(19) United States
(12) Patent Application Publication
(10) Pub. No.: US 2021/0115109 A1
(43) Pub. Date: Apr. 22, 2021

(54) CONJUGATES AND METHODS OF USE THEREOF FOR SELECTIVE DELIVERY OF IMMUNE-MODULATORY AGENTS

(71) Applicant: Silverback Therapeutics, Inc., Seattle, WA (US)

(72) Inventors: Peter Armstrong Thompson, Bellevue, WA (US); Robert Finley Dubose, Seattle, WA (US); Peter Robert Baum, Seattle, WA (US); Valerie Odegard, Seattle, WA (US)

(21) Appl. No.: 16/856,689

(22) Filed: Apr. 23, 2020

Related U.S. Application Data
(63) Continuation of application No. PCT/US2018/057175, filed on Oct. 23, 2018.
(60) Provisional application No. 62/576,545, filed on Oct. 24, 2017.

(51) Int. Cl. C07K 14/735; C07K 16/00

(52) U.S. Cl. CPC C07K 14/70535; C07K 2317/92; C07K 16/00

(57) ABSTRACT

Various compositions are disclosed. The compositions of conjugates comprising immune-modulatory agents are also provided. Additionally provided are the methods of preparation and use of the conjugates. This includes methods for treating disorders, such as cancer and fibrosis.

### CROSS-REFERENCE

[0001] This application is a continuation application of Serial No. PCT/US2018/057175, filed Oct. 23, 2018, which claims the benefit of U.S. Provisional Application No. 62/576,545, filed Oct. 24, 2017, each of which is incorporated herein by reference in its entirety.

### STATEMENT REGARDING SEQUENCE LISTING

[0002] The Sequence Listing associated with this application is provided in text format in lieu of a paper copy, and is hereby incorporated by reference into the specification. The name of the text file containing the Sequence Listing is 860234_423C1_Sequence_Listing.txt. The text file is 634 KB, was created on Jan. 4, 2021 and is being submitted electronically via EFS-Web.

### BACKGROUND

[0003] One of the leading causes of death in the United States is cancer. Conventional methods of cancer treatment, like traditional chemotherapy, surgery, or radiation therapy, tend to be highly toxic, nonspecific to a cancer, or both, resulting in limited efficacy and harmful side effects. The immune system has the potential to be a powerful, specific tool in fighting cancers. In many cases tumors can specifically express genes whose products are required for inducing or maintaining a malignant state. These proteins may serve as antigen markers for the development and establishment of more specific anti-cancer immune response. The immune response may include the recruitment of immune cells that target tumors expressing these antigen markers. Additionally, the immune cells may express genes whose products are important to proper immune function and may serve as markers for specific types of immune cells. The boosting of this specific immune response has the potential to be a powerful anti-cancer treatment that can be more effective than conventional methods of cancer treatment and can have fewer side effects. Immune modulatory conjugates are one way to provide a specific immune response. Such conjugates can be targeted to certain cell populations by selectively binding to markers, such as proteins or other cellular markers, on tumor or other target cells. There remains, however, a need to further target immune modulatory conjugates to activate an immune response at the target cell population.

### INCORPORATION BY REFERENCE

[0004] All publications, patents, and patent applications mentioned in this specification are herein incorporated by reference to the same extent as if each individual publication, patent, or patent application was specifically and individually indicated to be incorporated by reference.

### SUMMARY

[0005] Provided herein are immune-modulatory conjugates and methods for providing benefit to patient populations for two areas of unmet needs, namely in the treatment of cancers such as solid tumors and in autoimmune/inflammatory disease, particularly for the latter in disease with distinct disease sites such as fibrotic disease. The immune-modulatory conjugates are designed to selectively interact with certain cell populations and/or to selectively release an immune modulatory payload at the desired target cells or in the extracellular microenviroment adjacent such target cells.

[0006] In exemplary embodiments, an immune-modulatory conjugate comprises (a) an antibody construct comprising an antigen binding domain and an Fc domain, wherein the antigen binding domain specifically binds to a first antigen expressed on target cells associated with a disease; (b) at least one immune-modulatory agent; and (c) at least one linker, wherein each linker is covalently attached to the antibody construct and to at least one immune-modulatory agent, wherein in the conjugate: (i) the linker is a cleavable linker having a protease cleavage site cleavable by a protease that is preferentially localized in the extracellular microenvironment of the target cells, whereby cleavage of the protease cleavage site releases an active form of the immune-modulatory agent in the extracellular microenvironment; or (ii) the Fc domain comprises an amino acid sequence having a Kd for a first Fc receptor that is at least 10 fold higher than a Kd of the amino acid sequence for a wild-type IgG1 Fc domain for the first Fc receptor and having a Kd for a second F receptor that is the same or lower than a Kd of the amino acid sequence for a wild-type IgG1 Fc domain for the second Fc receptor, thereby allowing the Fc domain to preferentially bind to cells expressing the second Fc receptor; or (iii) the linker is as set forth in (i) and the Fc domain is as set forth in (ii).

[0007] Also provided are immune-modulatory conjugates comprising: (a) an immune-modulatory agent; (b) an antibody construct comprising an antigen binding domain and an Fc domain, wherein the antigen binding domain binds to a first antigen expressed on cells associated with a target disease having an extracellular microenvironment associated with the disease; and (c) a linker, wherein the linker is covalently bound to the antibody construct and the linker is covalently bound to the immune-modulatory agent, the linker further comprising a protease cleavage site cleavable by a disease-associated protease that is preferentially present within the extracellular microenvironment of the disease cells; wherein the immune-modulatory agent is inactive when covalently bound to the antibody construct, and wherein an active form of the immune-modulatory agent is released upon cleavage of the protease cleavage site by the protease

[0008] In exemplary embodiments, the conjugate can be represented by the following formula:

[chemical structure]

wherein: A is the antibody construct having the antigen binding domain and the Fc domain; L is the linker; Dₓ is the immune-modulatory agent; n is selected from 1 to 20; and z is selected from 1 to 20. In some exemplary embodiments, n is from 1 to 5 and z is from 1 to 8, n is 1 and z is from 1 to 8, or n is 1 and z is from 1 to 5. In some aspects, the immune-modulatory is as set forth in (iii).

[0009] In some exemplary embodiments, the linker, L, has the following formula: Rx-Aₙ-protease cleavage site-Y_{y}—, wherein Rx is a reactive moiety attached to the antibody construct; A is a stretcher group and n is 0 or 1; and Y is a self immolative group and y is 0, 1, or 2. In some aspects, Rx is a succinimide group or a hydrolyzed succinmide group and/or Y is a self-immolative group and is present. The self-immolative group can be, for example, a PABA or PABC group. The linker can be, for example, -maleimidocaproyl-protease cleave site-PABC-.

[0010] In some exemplary embodiments wherein the linker is a cleavable linker having a protease cleavage site cleavable by a protease, the protease cleavage site is selected from a site cleavable by a protease selected from the group consisting of legumain, plasmin, TMPRSS3, TMPRSS4, TMPRSS6, MMP1, MMP2, MMP-3, MMP-9, MMP-8, MMP-14, MT1-MMP, CATHEPSIN D, CATHEPSIN K, CATHEPSIN S, ADAM10, ADAM12, ADAMTS, Caspase-1, Caspase-2, Caspase-3, Caspase-4, Caspase-5, Caspase-6, Caspase-7, Caspase-8, Caspase-9, Caspase-10, Caspase-11, Caspase-12, Caspase-13, Caspase-14, TACE, human neutrophil elastase, beta-secretase, uPA, fibroblast associated protein, matriptase, PSMA and PSA. In other embodiments, the protease cleavage site is selected from a site cleavable by a protease selected from one of the groups consisting of: Legumain and plasmin; TMPRSS3, TMPRSS4, and TMPRSS6; MMP1, MMP2, MMP-3, MMP-9, MMP-8, MMP-14, and MT1-MMP; CATHEPSIN D, CATHEPSIN K, and CATHEPSIN S; ADAM10, ADAM12 and ADAMTS; Caspase-1, Caspase-2, Caspase-3, Caspase-4, Caspase-5, Caspase-6, Caspase-7, Caspase-8, Caspase-9, Caspase-10, Caspase-11, Caspase-12, Caspase-13, and Caspase-14; and TACE, human neutrophil elastase, beta-secretase, uPA, fibroblast associated protein, matriptase, PSMA and PSA. In some aspects, the protease cleavage site is selected from a site cleavable by a protease selected from TMPRSS3, TMPRSS4, and TMPRSS6. In other aspects, the protease cleavage site is selected from a site cleavable by a protease selected from MMP1, MMP2, MMP-3, MMP-9, MMP-8, MMP-14, and MT1-MMP.

[0011] In some exemplary embodiments, the protease is preferentially localized in the extracellular microenvironment of the target cells as compared to the extracellular microenvironment of normal cells by a factor of at least 5:1, 10:1, 25:1, 50:1 or 100:1. In some exemplary embodiments, the active form of the immune-modulatory agent is preferentially released in the extracellular microenvironment as compared to the extracellular microenvironment of normal cells by a factor of at least 5:1, 10:1, 25:1, 50:1 or 100:1.

[0012] In some exemplary embodiments, the linker of the immune-modulatory conjugate is not a cleavable linker. The non-cleavable linker can be, for example, represented by the formula:

[chemical structure]

wherein RX* is a bond, a succinimide moiety, or a hydrolyzed succinimide moiety, wherein

[chemical structure]

on RX* represents the point of attachment to the residue of the antibody construct.

[0013] In some exemplary embodiments, the immune-modulatory conjugates comprise a Fc domain comprising an amino acid sequence having a Kd for a first Fc receptor. The first Fc receptor can be, for example, an FcγRI, FcγRIIA, FcγRIIB, FcγRIIIA, or FcγRIIIB receptor and the second Fc receptor can be, for example, an FcRn receptor. In some embodiments, the first Fc receptor is an FcγRI, FcγRIIA and FcγRIIIA and the second Fc receptor is an FcRn receptor. In some aspects, the Kd of the Fc domain for the FcRn is at least 5 fold lower than the binding of a wild-type IgG1 to FcRn. In some aspects, the cells expressing the second Fc receptor are dendritic cells. In some aspects, the Fc domain is an Fcnun. In some aspects, the Fc domain amino acid sequence has a Kd for binding to FcRn that is at least 10 fold higher than a Kd of the amino acid sequence for a wild-type IgG1 Fc domain for FcRn receptors. In some aspects, the Fc domain comprises an amino acid sequence having at least one amino acid residue change selected from a group consisting of: a) F243L, R292P, Y300L, L235V, and P396L, wherein numbering of amino acid residues in the Fc domain is according to the EU index; b) S239D and 1332E, wherein numbering of amino acid residues in the Fc domain is according to the EU index; c) S298A, E333A, and K334A, wherein numbering of amino acid residues in the Fc domain is according to the EU index; and d) H435A, wherein numbering of amino acid residues in the Fc domain is according to the EU index.

[0014] Exemplary immune-modulatory conjugates comprise an antibody construct that comprises an antigen binding domain that binds to a first antigen. The first antigen can be selected, for example, from the group consisting of GD2, GD3, GM2, Le^{y}, sLe, polysialic acid, fucosyl GM1, Tn, STn, BM3, GloboH, CD5, CD19, CD20, CD25, CD37, CD30, CD33, CD45, CAMPATH-1, BCMA, CS-1, PD-L1, B7-H3, B7-DC (PD-L2), HLA-DR, carcinoembryonic antigen (CEA), TAG-72, MUC1, MUC15, MUC16, folate-binding protein, A33, G250, prostate-specific membrane antigen (PSMA), STN1, TNC, CA-125, CA19-9, epidermal growth factor, HER2, IL-2 receptor, EGFRvIII (de2-7 EGFR), EGFR, fibroblast activation protein (FAP), tenascin, a metalloproteinase, endosialin, vascular endothelial growth factor, αvβ3, WT1, LMP2, HPV E6, HPV E7, p53 nonmutant, NY-ESO-1, GLP-3, MelanA/MART1, Ras mutant, gp100, p53 mutant, PR1, bcr-abl, tyrosinase, survivin, PSA, hTERT, a Sarcoma translocation breakpoint fusion protein, EphA2, PAP, ML-IAP, AFP, ERG, NA17, PAX3, ALK, androgen receptor, cyclin B1, MYCN, RhoC, TRP-2, mesothelin (MSLN), PSCA, MAGE A1, MAGE-A3, CYP1B1, PLAV1, BORIS, Tn, ETV6-AML, NY-BR-1, RGS5, SART3, Carbonic anhydrase IX, PAX5, OY-TES1, Sperm protein 17, LCK, MAGE C2, MAGE A4, GAGE, TRAIL1, HMWMAA, AKAP-4, SSX2, XAGE 1, B7H3, Legumain, Tie 3, PAGE4, VEGFR2, MAD-CT-1, PDGFR-B, MAD-CT-2, ROR2, CMET, HER3, EPCAM, CA6, NAPI2B, TROP2, Claudin-6 (CLDN6), Claudin-16 (CLDN16), CLDN18.2, RON, LY6E, FRA, DLL3, PTK7, Uroplakin-1B (UPK1B), LIV1, ROR1, STRA6, TMPRSS3, TMPRSS4, TMEM238, Clorf186, Fos-related antigen 1, VEGFR1, endoglin, VTCN1 (B7-H4), and VISTA. In some aspects, the first antigen is selected from the group consisting of EGFR, CMET, HER3, MUC1, MUC16, EPCAM, MSLN, CA6, NAPI2B, TROP2, CEA, CLDN18.2, EGFRvIII, FAP, EphA2, RON, LY6E, FRA, PSMA, DLL3, PTK7, LIV1, ROR1, MAGE-A3, NY-ESO-1, LRRC15, GLP-3, CLDN6, CLDN16, UPK1B, VTCN1, and STRA6. In some aspects, the first antigen is LRRC15, FAP or MUC16. In some aspects, the first antigen is selected from the group consisting of Cadherin 11, PDPN, LRRC15, Integrin α4β7, Integrin α2β1, MADCAM, Nephrin, Podocin, IFNAR1, BDCA2, CD30, c-KIT, FAP, CD73, CD38, PDGFRβ, Integrin αvβ31, Integrin αvβ3, Integrin αvβ8, GARP, Endosialin, CTGF, Integrin αvβ6, CD40, PD-1, TIM-3, TNFR2, DEC205, DCIR, CD86, CD45RB, CD45RO, MHC Class II, CD25, LRRC15, MMP14, GPX8, and F2RL2. The first antigen is typically expressed on cells associated with a disease. In some aspects, the disease is a cancer. The cancer can be, for example, selected from the group consisting of metastatic pancreatic adenocarcinoma, metastatic colorectal adenocarcinoma, breast invasive carcinoma, squamous cell lung cancer and metastatic head and neck squamous cell carcinoma. In some aspects, the disease is a fibrotic or inflammatory disease of the liver, kidney or lung, systemic scleroderma, idiopathic pulmonary fibrosis (IPF), NASH, cardiomyopathy, renal fibrosis, liver fibrosis, lung fibrosis or systemic scleroderma. The first antigen can be, for example, a ligand bound to a receptor on cells in the microenvironment of the disease

[0015] The immune-modulatory conjugates comprise at least one immune-modulatory agent. The immune-modulatory agent can be, for example, a toll-like receptor agonist, STING agonist, RIG-I agonist, PAMP agonist, DAMP agonist or a kinase inhibitor. The toll-like receptor agonist can be, for example, selected from a TLR1 agonist, a TLR2 agonist, a TLR3 agonist, a TLR4 agonist, a TLR5 agonist, a TLR6 agonist, a TLR7 agonist, a TLR8 agonist, a TLR9 agonist, or a TLR10 agonist. The TLR7 agonist can be, for example, selected from the group consisting of an imidazoquinoline, an imidazoquinoline amine, a thiazoquinoline, an aminoquinoline, an aminoquinazoline, a pyrido [3,2-d]pyrimidine-2,4-diamine, pyrimidine-2,4-diamine, 2-aminoimidazole, 1-alkyl-1H-benzimidazol-2-amine, tetrahydropyridopyrimidine, heteroarothiadiazide-2,2-dioxide, and a benzonaphthyridine. The TLR8 agonist can be selected, for example, from the group consisting of a benzazepine, an imidazoquinoline, a thiazoloquinoline, an aminoquinoline, an aminoquinazoline, a pyrido [3,2-d]pyrimidine-2,4-diamine, a pyrimidine-2,4-diamine, a 2-aminoimidazole, a 1-alkyl-1H-benzimidazol-2-amine, and a tetrahydropyridopyrimidine. In some aspects, the immune-modulatory agent is an inhibitor of a GCPR, an ion channel, a membrane transporter, a phosphatase or an ER protein. In some aspects, the immune-modulatory agent is an antagonist of the GPCR A2aR, the sphingosine 1-phosphate receptor 1, prostaglandin receptor EP3, prostanglandin receptor E2, Frizzled, CXCR4 or an LPA receptor. The ion channel agonist can be, for example, an ion channel agonist for CRAC, Kv1.3 or KCa3.1. In some aspects, the immune-modulatory agent is an inhibitor of HSP90 or AAA-ATPase p97; an inhibitor of TGFβ, the TGFβ signaling pathway, or the β-Catenin pathway; or an inhibitor of TNIK, Tankyrase, PI3K-beta, STAT3, IL-10, IDO, or TDO.

[0016] The immune-modulatory conjugates typically comprise an antigen binding domain. In some aspects, the antigen binding domain comprises at least 80% sequence identity to a set of variable region CDR sequences set forth in TABLE 1, wherein the assignment of CDR residues are defined according to the IMGT (the international ImMunoGeneTics information system). In other aspects, the antigen binding domain comprises a variable region comprising V_{H} and V_{L} sequences at least 80% sequence identity to a pair of V_{H} and V_{L} sequences set forth in TABLE 2. In even other aspects, the antigen binding domain comprises a variable region having V_{H} and V_{L} sequences having at least 80% sequence identity to a V_{H} or V_{L} sequence set forth in TABLE 6.

[0017] Also provided herein are pharmaceutical compositions comprising the immune-modulatory conjugates described herein and a pharmaceutically acceptable carrier as well as methods for the treatment of a subject in need thereof, comprising administering a therapeutic dose of a conjugate described herein or a pharmaceutical composition described herein. The conjugate can be, for example, administered intravenously, cutaneously, subcutaneously, or injected at a site of affliction. Immune-modulatory conjugates and pharmaceutical compositions described herein can be used as a medicament and for use in the treatment of disease, including cancer, fibrotic or inflammatory disease of the liver, kidney or lung, systemic scleroderma, idiopathic pulmonary fibrosis (IPF), NASH, cardiomyopathy, renal fibrosis, liver fibrosis, lung fibrosis, or systemic scleroderma.

### BRIEF DESCRIPTION OF THE DRAWINGS

[0018] FIG. 1A-FIG. 1B: show stimulation of TNFα production by monocytes (FIG. 1A) and macrophages (FIG. 1B) in response to a wild-type (filled circles), FcγR null (filled squares), FcγR/FcRN Null (open squares) and FcRN null (open circles) Her2 TLR8 benzazepine agonist.

[0019] FIG. 2: shows stimulation of TNFα production in the presence of wild-type Her2 TLR8 benzazepine agonist control (filled circles) and in the presence of Her2 TLR8 benzazepine agonist with anti CD16 antibody (filled triangles), anti-CD32 antibody (bolded open squares), anti-CD64 antibody (half-filled squares), and a combination of anti-CD16, 32, and 64 antibodies (filled squares).

[0020] FIG. 3: shows stimulation of IL12 production in the presence of wild-type Her2 TLR8 benzazepine agonist control (open squares) and in the presence of Her2 TLR8 benzazepine agonist with anti CD16 antibody (filled triangles), anti-CD32 antibody (half-side filled squares), anti-CD64 antibody (half-top filled squares), and a combination of anti-CD16, 32, and 64 antibodies (filled squares).

### DETAILED DESCRIPTION

[0021] Additional aspects and advantages of the present disclosure will become apparent to those skilled in this art from the following detailed description, wherein illustrative aspects of the present disclosure are shown and described. As will be realized, the present disclosure is capable of other and different aspects, and its several details are capable of modifications in various respects, all without departing from the disclosure. Accordingly, the drawings and description are to be regarded as illustrative in nature, and not as restrictive.

[0022] As used herein, “identical” or “percent (%) identity” refer to the identity between a DNA, RNA, nucleotide, amino acid, peptide, polypeptide or protein sequence to another DNA, RNA, nucleotide, amino acid, peptide, polypeptide or protein sequence. Identity is expressed in terms of a percentage of sequence identity of a first sequence to a second sequence. Percent (%) sequence identity with respect to a reference DNA sequence is the percentage of DNA nucleotides in a candidate sequence that are identical with the DNA nucleotides in the reference DNA sequence after aligning the sequences. Percent (%) sequence identity with respect to a reference amino acid sequence is the percentage of amino acid residues in a candidate sequence that are identical with the amino acid residues in the reference amino acid sequence after aligning the sequences and introducing gaps, if necessary, to achieve the maximum percent sequence identity, and not considering any conservative substitutions as part of the sequence identity.

[0023] As used herein, the term “antibody” refers to an immunoglobulin molecule that specifically binds to, or is immunologically reactive toward, a specific antigen. Antibody can include, for example, polyclonal, monoclonal, genetically engineered, and antigen binding fragments thereof. An antibody can be, for example, murine, chimeric, or humanized or a heteroconjugate, bispecific, diabody, triabody, or tetrabody. The antigen binding fragment can include, for example, Fab′, F(ab′)2, Fab, Fv, rIgG, scFv, hcAbs (heavy chain antibodies), a single domain antibody, VHH, VNAR, sdAbs, or nanobody.

[0024] As used herein, “recognize”, “specifically binds” and “specifically bind” refer to the specific association or binding between an antigen binding domain and an antigen, as compared to a non-specific association between an antigen binding domain and a non-antigen. In some embodiments, an antigen binding domain that recognizes or specifically binds to an antigen has a dissociation constant (KD) of <<100 nM, <10 nM, <1 nM, <0.1 nM, <0.01 nM, or <0.001 nM (e.g. 10⁻⁸M or less, e.g. from 10⁻⁸M to 10⁻¹³M, e.g., from 10⁻⁹M to 10⁻¹³M).

[0025] As used herein, a “tumor antigen” refers to an antigenic substance associated with a tumor or cancer cell, and can trigger an immune response in a host.

[0026] As used herein, an “antibody construct” refers to a construct that contains at least one antigen binding domain and an Fc domain.

[0027] As used herein, an “antigen binding domain” refers to a binding domain from an antibody or from a non-antibody that can specifically bind to the antigen. Antigen binding domains can be numbered when there is more than one antigen binding domain in a given conjugate or antibody construct (e.g., first antigen binding domain, second antigen binding domain, third antigen binding domain, etc.). Different antigen binding domains in the same conjugate or construct can target the same antigen or different antigens (e.g., first antigen binding domain that can specifically bind to a tumor antigen, a second antigen binding domain that can specifically bind to a tumor antigen and a third antigen binding domain that can specifically bind to an APC antigen; or a first antigen binding domain that can specifically bind a tumor antigen, a second antigen binding domain that can specifically bind to an antigen on an antigen presenting cell (APC antigen), and a third antigen binding domain that can specifically bind to an APC antigen).

[0028] As used herein, a “Fc domain” refers to an Fc domain from an antibody or from a non-antibody that can bind to an Fc receptor.

[0029] As used herein, a “target binding domain” refers to a construct that contains an antigen binding domain from an antibody or from a non-antibody that can bind to the antigen.

[0030] As used herein, a “disease” refers to a disorder of structure or function in a subject (e.g., a human or animal), especially one that produces specific signs or symptoms or that affects a specific location and is not simply a direct result of physical injury.

[0031] As used herein, a “microenvironment” refers to the extracellular environment in which cells of a disease are located and that have an extracellular space(s) in which proteases and other soluble proteins and factors are located. A microenvironment can contain, for example, blood vessels, immune cells, fibroblasts, bone marrow-derived inflammatory cells, lymphocytes, signaling molecules and the extracellular matrix (ECM).

[0032] As used herein, the abbreviations for the natural 1-enantiomeric amino acids are conventional and can be as follows: alanine (A, Ala); arginine (R, Arg); asparagine (N, Asn); aspartic acid (D, Asp); cysteine (C, Cys); glutamic acid (E, Glu); glutamine (Q, Gln); glycine (G, Gly); histidine (H, His); isoleucine (I, Ile); leucine (L, Leu); lysine (K, Lys); methionine (M, Met); phenylalanine (F, Phe); proline (P, Pro); serine (S, Ser); threonine (T, Thr); tryptophan (W, Trp); tyrosine (Y, Tyr); valine (V, Val). Unless otherwise specified, X can indicate any amino acid. In some aspects, X can be asparagine (N), glutamine (Q), histidine (H), lysine (K), or arginine (R).

[0033] The terms “salt” or “pharmaceutically acceptable salt” refer to salts derived from a variety of organic and inorganic counter ions well known in the art. Pharmaceutically acceptable acid addition salts can be formed with inorganic acids and organic acids. Inorganic acids from which salts can be derived include, for example, hydrochloric acid, hydrobromic acid, sulfuric acid, nitric acid, phosphoric acid, and the like. Organic acids from which salts can be derived include, for example, acetic acid, propionic acid, glycolic acid, pyruvic acid, oxalic acid, maleic acid, malonic acid, succinic acid, fumaric acid, tartaric acid, citric acid, benzoic acid, cinnamic acid, mandelic acid, methanesulfonic acid, ethanesulfonic acid, p-toluenesulfonic acid, salicylic acid, and the like. Pharmaceutically acceptable base addition salts can be formed with inorganic and organic bases. Inorganic bases from which salts can be derived include, for example, sodium, potassium, lithium, ammonium, calcium, magnesium, iron, zinc, copper, manganese, aluminum, and the like. Organic bases from which salts can be derived include, for example, primary, secondary, and tertiary amines, substituted amines including naturally occurring substituted amines, cyclic amines, basic ion exchange resins, and the like, specifically such as isopropylamine, trimethylamine, diethylamine, triethylamine, tripropylamine, and ethanolamine. In some embodiments, the pharmaceutically acceptable base addition salt is chosen from ammonium, potassium, sodium, calcium, and magnesium salts.

[0034] The term “C_{x-y}” when used in conjunction with a chemical moiety, such as alkyl, alkenyl, or alkynyl is meant to include groups that contain from x to y carbons in the chain. For example, the term “C_{x-y}alkyl” refers to substituted or unsubstituted saturated hydrocarbon groups, including straight-chain alkyl and branched-chain alkyl groups that contain from x to y carbons in the chain, including haloalkyl groups such as trifluoromethyl and 2,2,2-trifluoroethyl, etc.

[0035] The terms “C_{x-y}alkenyl” and “C_{X-y}alkynyl” refer to substituted or unsubstituted unsaturated aliphatic groups analogous in length and possible substitution to the alkyls described above, but that contain at least one double or triple bond respectively.

[0036] “Alkylene” refers to a straight divalent hydrocarbon chain linking the rest of the molecule to a radical group, consisting solely of carbon and hydrogen, containing no unsaturation, and preferably having from one to twelve carbon atoms, for example, methylene, ethylene, propylene, butylene, and the like. The alkylene chain is attached to the rest of the molecule through a single bond and to the radical group through a single bond. The points of attachment of the alkylene chain to the rest of the molecule and to the radical group are through the terminal carbons respectively. In other embodiments, an alkylene comprises one to five carbon atoms (i.e., C₁-C₅ alkylene). In other embodiments, an alkylene comprises one to four carbon atoms (i.e., C₁-C₄ alkylene). In other embodiments, an alkylene comprises one to three carbon atoms (i.e., C₁-C₃ alkylene). In other embodiments, an alkylene comprises one to two carbon atoms (i.e., C₁-C₂ alkylene). In other embodiments, an alkylene comprises one carbon atom (i.e., C₁ alkylene). In other embodiments, an alkylene comprises five to eight carbon atoms (i.e., C₅-C₈ alkylene). In other embodiments, an alkylene comprises two to five carbon atoms (i.e., C₂-C₅ alkylene). In other embodiments, an alkylene comprises three to five carbon atoms (i.e., C₃-C₅ alkylene). Unless stated otherwise specifically in the specification, an alkylene chain is optionally substituted by one or more substituents such as those substituents described herein.

[0037] “Alkenylene” refers to a straight divalent hydrocarbon chain linking the rest of the molecule to a radical group, consisting solely of carbon and hydrogen, containing at least one carbon-carbon double bond, and preferably having from two to twelve carbon atoms. The alkenylene chain is attached to the rest of the molecule through a single bond and to the radical group through a single bond. The points of attachment of the alkenylene chain to the rest of the molecule and to the radical group are through the terminal carbons respectively. In other embodiments, an alkenylene comprises two to five carbon atoms (i.e., C₂-C₅ alkenylene). In other embodiments, an alkenylene comprises two to four carbon atoms (i.e., C₂-C₄ alkenylene). In other embodiments, an alkenylene comprises two to three carbon atoms (i.e., C₂-C₃ alkenylene). In other embodiments, an alkenylene comprises two carbon atom (i.e., C₂ alkenylene). In other embodiments, an alkenylene comprises five to eight carbon atoms (i.e., C₅-C₈ alkenylene). In other embodiments, an alkenylene comprises three to five carbon atoms (i.e., C₃-C₅ alkenylene). Unless stated otherwise specifically in the specification, an alkenylene chain is optionally substituted by one or more substituents such as those substituents described herein.

[0038] “Alkynylene” refers to a straight divalent hydrocarbon chain linking the rest of the molecule to a radical group, consisting solely of carbon and hydrogen, containing at least one carbon-carbon triple bond, and preferably having from two to twelve carbon atoms. The alkynylene chain is attached to the rest of the molecule through a single bond and to the radical group through a single bond. The points of attachment of the alkynylene chain to the rest of the molecule and to the radical group are through the terminal carbons respectively. In other embodiments, an alkynylene comprises two to five carbon atoms (i.e., C₂-C₅ alkynylene). In other embodiments, an alkynylene comprises two to four carbon atoms (i.e., C₂-C₄ alkynylene). In other embodiments, an alkynylene comprises two to three carbon atoms (i.e., C₂-C₃ alkynylene). In other embodiments, an alkynylene comprises two carbon atom (i.e., C₂ alkynylene). In other embodiments, an alkynylene comprises five to eight carbon atoms (i.e., C₅-C₈ alkynylene). In other embodiments, an alkynylene comprises three to five carbon atoms (i.e., C₃-C₅ alkynylene). Unless stated otherwise specifically in the specification, an alkynylene chain is optionally substituted by one or more substituents such as those substituents described herein.

[0039] The term “carbocycle” as used herein refers to a saturated, unsaturated or aromatic ring in which each atom of the ring is carbon. Carbocycle includes 3- to 10-membered monocyclic rings, 6- to 12-membered bicyclic rings, and 6- to 12-membered bridged rings. Each ring of a bicyclic carbocycle may be selected from saturated, unsaturated, and aromatic rings. In an exemplary embodiment, an aromatic ring, e.g., phenyl, may be fused to a saturated or unsaturated ring, e.g., cyclohexane, cyclopentane, or cyclohexene. Any combination of saturated, unsaturated and aromatic bicyclic rings, as valence permits, is included in the definition of carbocyclic. Exemplary carbocycles include cyclopentyl, cyclohexyl, cyclohexenyl, adamantyl, phenyl, indanyl, and naphthyl. The term “unsaturated carbocycle” refers to carbocycles with at least one degree of unsaturation and excluding aromatic carbocycles. Examples of unsaturated carbocycles include cyclohexadiene, cyclohexene, and cyclopentene.

The term “heterocycle” as used herein refers to a saturated, unsaturated or aromatic ring comprising one or more heteroatoms. Exemplary heteroatoms include N, O, Si, P, B, and S atoms. Heterocycles include 3- to 10-membered monocyclic rings, 6- to 12-membered bicyclic rings, and 6- to 12-membered bridged rings. Each ring of a bicyclic heterocycle may be selected from saturated, unsaturated, and aromatic rings wherein at least one of the rings includes a heteroatom. In an exemplary embodiment, an aromatic ring, e.g., pyridyl, may be fused to a saturated or unsaturated ring, e.g., cyclohexane, cyclopentane, morpholine, piperidine or cyclohexene. The term “unsaturated heterocycle” refers to heterocycles with at least one degree of unsaturation and excluding aromatic heterocycles. Examples of unsaturated heterocycles include dihydropyrrole, dihydrofuran, oxazoline, pyrazoline, and dihydropyridine.

[0040] The term “heteroaryl” includes aromatic single ring structures, preferably 5- to 7-membered rings, more preferably 5- to 6-membered rings, whose ring structures include at least one heteroatom, preferably one to four heteroatoms, more preferably one or two heteroatoms. The term “heteroaryl” also include polycyclic ring systems having two or more cyclic rings in which two or more carbons are common to two adjoining rings wherein at least one of the rings is heteroaromatic, e.g., the other cyclic rings can be aromatic or non-aromatic carbocyclic, or heterocyclic. Heteroaryl groups include, for example, pyrrole, furan, thiophene, imidazole, oxazole, thiazole, pyrazole, pyridine, pyrazine, pyridazine, and pyrimidine, and the like.

[0041] The term “substituted” refers to moieties having substituents replacing a hydrogen on one or more carbons or substitutable heteroatoms, e.g., NH, of the structure. It will be understood that “substitution” or “substituted with” includes the implicit proviso that such substitution is in accordance with permitted valence of the substituted atom and the substituent, and that the substitution results in a stable compound, i.e., a compound which does not spontaneously undergo transformation such as by rearrangement, cyclization, elimination, etc. In certain embodiments, substituted refers to moieties having substituents replacing two hydrogen atoms on the same carbon atom, such as substituting the two hydrogen atoms on a single carbon with an oxo, imino or thioxo group. As used herein, the term “substituted” is contemplated to include all permissible substituents of organic compounds. In a broad aspect, the permissible substituents include acyclic and cyclic, branched and unbranched, carbocyclic and heterocyclic, aromatic and non-aromatic substituents of organic compounds. The permissible substituents can be one or more and the same or different for appropriate organic compounds. For purposes of this disclosure, the heteroatoms such as nitrogen may have hydrogen substituents and/or any permissible substituents of organic compounds described herein which satisfy the valences of the heteroatoms.

[0042] In some embodiments, substituents may include any substituents described herein, for example: halogen, hydroxy, oxo (═O), thioxo (═S), cyano (—CN), nitro (—NO₂), imino (═N—H), oximo (═N—OH), hydrazino (═N—NH₂), —R^{b}—OR^{a}, —R^{b}—OC(O)—R^{a}, —R^{b}—OC(O)—OR^{a}, —R^{b}—OC(O)—N(R^{a})₂, —R^{b}—N(R^{a})₂, —R^{b}—C(O)R^{a}, —R^{b}—C(O)OR^{a}, —R^{b}—C(O)N(R^{a})₂, —R^{b}—O—R^{c}—C(O)N(R^{a})₂, —R^{b}—N(R^{a})C(O)OR^{a}, —R^{b}—N(R^{a})C(O)R^{a}, —R^{b}—N(R^{a})S(O)ₜR^{a} (where t is 1 or 2), —R^{b}—S(O)ₜR^{a} (where t is 1 or 2), —R^{b}—S(O)ₜOR^{a} (where t is 1 or 2), and —R^{b}—S(O)ₜN(R^{a})₂ (where t is 1 or 2); and alkyl, alkenyl, alkynyl, aryl, aralkyl, aralkenyl, aralkynyl, cycloalkyl, cycloalkylalkyl, heterocycloalkyl, heterocycloalkylalkyl, heteroaryl, and heteroarylalkyl any of which may be optionally substituted by alkyl, alkenyl, alkynyl, halogen, haloalkyl, haloalkenyl, haloalkynyl, oxo (═O), thioxo (═S), cyano (—CN), nitro (—NO2), imino (═N—H), oximo (═N—OH), hydrazine (═N—NH₂), —R^{b}—OR^{a}, —R^{b}—OC(O)—R^{a}, —R^{b}—OC(O)—OR^{a}, —R^{b}—OC(O)—N(R^{a})₂, —R^{b}—N(R^{a})₂, —R^{b}—C(O)R^{a}, —R^{b}—C(O)OR^{a}, —R^{b}—C(O)N(R^{a})₂, —R^{b}—O—R^{c}—C(O)N(R^{a})₂, —R^{b}—N(R^{a})C(O)OR^{a}, —R^{b}—N(R^{a})C(O)R^{a}, —R^{b}—N(R^{a})S(O)ₜR^{a} (where t is 1 or 2), —R^{b}—S(O)ₜR^{a} (where t is 1 or 2), —R^{b}—S(O)ₜOR^{a} (where t is 1 or 2) and —R^{b}—S(O)ₜN(R^{a})₂ (where t is 1 or 2); wherein each R^{a} is independently selected from hydrogen, alkyl, cycloalkyl, cycloalkylalkyl, aryl, aralkyl, heterocycloalkyl, heterocycloalkylalkyl, heteroaryl, or heteroarylalkyl, wherein each R^{a}, valence permitting, may be optionally substituted with alkyl, alkenyl, alkynyl, halogen, haloalkyl, haloalkenyl, haloalkynyl, oxo (═O), thioxo (═S), cyano (—CN), nitro (—NO₂), imino (═N—H), oximo (═N—OH), hydrazine (═N—NH₂), —R^{b}—OR^{a}, —R^{b}—OC(O)—R^{a}, —R^{b}—OC(O)—OR^{a}, —R^{b}—OC(O)—N(R^{a})₂, —R^{b}—N(R^{a})₂, —R^{b}—C(O)R^{a}, —R^{b}—C(O)OR^{a}, —R^{b}—C(O)N(R^{a})₂, —R^{b}—O—R^{c}—C(O)N(R^{a})₂, —R^{b}—N(R^{a})C(O)OR^{a}, —R^{b}—N(R^{a})C(O)R^{a}, —R^{b}—N(R^{a})S(O)ₜR^{a} (where t is 1 or 2), —R^{b}—S(O)ₜR^{a} (where t is 1 or 2), —R^{b}—S(O)ₜOR^{a} (where t is 1 or 2) and —R^{b}—S(O)ₜN(R^{a})₂ (where t is 1 or 2); and wherein each R^{b} is independently selected from a direct bond or a straight or branched alkylene, alkenylene, or alkynylene chain, and each R^{c} is a straight or branched alkylene, alkenylene or alkynylene chain.

[0043] It will be understood by those skilled in the art that substituents can themselves be substituted, if appropriate. Unless specifically stated as “unsubstituted,” references to chemical moieties herein are understood to include substituted variants. For example, reference to a “heteroaryl” group or moiety implicitly includes both substituted and unsubstituted variants.

[0044] Chemical entities having carbon-carbon double bonds or carbon-nitrogen double bonds may exist in Z- or E-form (or cis- or trans-form). Furthermore, some chemical entities may exist in various tautomeric forms. Unless otherwise specified, chemical entities described herein are intended to include all Z-, E- and tautomeric forms as well.

[0045] A “tautomer” refers to a molecule wherein a proton shift from one atom of a molecule to another atom of the same molecule is possible. The compounds presented herein, in certain embodiments, exist as tautomers. In circumstances where tautomerization is possible, a chemical equilibrium of the tautomers will exist. The exact ratio of the tautomers depends on several factors, including physical state, temperature, solvent, and pH. Some examples of tautomeric equilibrium include:

[chemical structure]

[0046] The compounds disclosed herein, in some embodiments, are used in different enriched isotopic forms, e.g., enriched in the content of ²H, ³H, ¹¹C, ¹³C and/or ¹⁴C. In one particular embodiment, the compound is deuterated in at least one position. Such deuterated forms can be made by the procedure described in U.S. Pat. Nos. 5,846,514 and 6,334,997. As described in U.S. Pat. Nos. 5,846,514 and 6,334,997, deuteration can improve the metabolic stability and or efficacy, thus increasing the duration of action of drugs.

[0047] Unless otherwise stated, structures depicted herein are intended to include compounds which differ only in the presence of one or more isotopically enriched atoms. For example, compounds having the present structures except for the replacement of a hydrogen by a deuterium or tritium, or the replacement of a carbon by ¹³C- or ¹⁴C-enriched carbon are within the scope of the present disclosure.

[0048] The compounds optionally contain unnatural proportions of atomic isotopes at one or more atoms that constitute such compounds. For example, the compounds may be labeled with isotopes, such as for example, deuterium (²H), tritium (³H), iodine-125 (¹²⁵I) or carbon-14 (¹⁴C). Isotopic substitution with ²H, ¹¹C, ¹³C, ¹⁴C, ¹⁵C, ¹²N, ¹³N, ¹⁵N, ¹⁶N, ¹⁶O, ¹⁷O, ¹⁴F, ¹⁵F, ¹⁶F, ¹⁷F, ¹⁸F, ³³S, ³⁴S, ³⁵S, ³⁶S, ³⁵Cl, ³⁷Cl, ⁷⁹Br, ⁸¹Br, ¹²⁵I are all contemplated. All isotopic variations of the compounds of the present invention, whether radioactive or not, are encompassed within the scope of the present invention.

[0049] In certain embodiments, the compounds disclosed herein have some or all of the ¹H atoms replaced with ²H atoms. The methods of synthesis for deuterium-containing compounds are known in the art and include, by way of non-limiting example only, the following synthetic methods.

Deuterium substituted compounds are synthesized using various methods such as described in: Dean, Dennis C.; Editor. Recent Advances in the Synthesis and Applications of Radiolabeled Compounds for Drug Discovery and Development. [In: Curr., Pharm. Des., 2000; 6(10)] 2000, 110 pp; George W.; Varma, Rajender S. The Synthesis of Radiolabeled Compounds via Organometallic Intermediates, Tetrahedron, 1989, 45(21), 6601-21; and Evans, E. Anthony. Synthesis of radiolabeled compounds, J. Radioanal. Chem., 1981, 64(1-2), 9-32.

[0050] Deuterated starting materials are readily available and are subjected to the synthetic methods described herein to provide for the synthesis of deuterium-containing compounds. Large numbers of deuterium-containing reagents and building blocks are available commercially from chemical vendors, such as Aldrich Chemical Co.

[0051] Compounds also include crystalline and amorphous forms of those compounds, pharmaceutically acceptable salts, and active metabolites of these compounds having the same type of activity, including, for example, polymorphs, pseudopolymorphs, solvates, hydrates, unsolvated polymorphs (including anhydrates), conformational polymorphs, and amorphous forms of the compounds, as well as mixtures thereof.

[0052] The phrases “parenteral administration” and “administered parenterally” as used herein refer to modes of administration other than enteral and topical administration, usually by injection, and includes, without limitation, intravenous, intramuscular, intraarterial, intrathecal, intracapsular, intraorbital, intracardiac, intradermal, intraperitoneal, transtracheal, subcutaneous, subcuticular, intraarticular, subcapsular, subarachnoid, intraspinal and intrasternal injection and infusion.

[0053] The phrase “pharmaceutically acceptable” is employed herein to refer to those compounds, materials, compositions, and/or dosage forms which are, within the scope of sound medical judgment, suitable for use in contact with the tissues of human beings and animals without excessive toxicity, irritation, allergic response, or other problem or complication, commensurate with a reasonable benefit/risk ratio.

[0054] The phrase “pharmaceutically acceptable excipient” or “pharmaceutically acceptable carrier” as used herein means a pharmaceutically acceptable material, composition or vehicle, such as a liquid or solid filler, diluent, excipient, solvent or encapsulating material. Each carrier must be “acceptable” in the sense of being compatible with the other ingredients of the formulation and not injurious to the patient. Some examples of materials which can serve as pharmaceutically acceptable carriers include: (1) sugars, such as lactose, glucose and sucrose; (2) starches, such as corn starch and potato starch; (3) cellulose, and its derivatives, such as sodium carboxymethyl cellulose, ethyl cellulose and cellulose acetate; (4) powdered tragacanth; (5) malt; (6) gelatin; (7) talc; (8) excipients, such as cocoa butter and suppository waxes; (9) oils, such as peanut oil, cottonseed oil, safflower oil, sesame oil, olive oil, corn oil and soybean oil; (10) glycols, such as propylene glycol; (11) polyols, such as glycerin, sorbitol, mannitol and polyethylene glycol; (12) esters, such as ethyl oleate and ethyl laurate; (13) agar; (14) buffering agents, such as magnesium hydroxide and aluminum hydroxide; (15) alginic acid; (16) pyrogen-free water; (17) isotonic saline; (18) Ringer's solution; (19) ethyl alcohol; (20) phosphate buffer solutions; and (21) other non-toxic compatible substances employed in pharmaceutical formulations.

### Antigens

[0055] An antigen can be a protein, polysaccharide, lipid, or glycolipid, which can be recognized by an antibody or other antigen binding domain or by an immune cell, such as a T cell or a B cell. Exposure of immune cells to one or more of these antigens can elicit a rapid cell division and differentiation response resulting in the formation of clones of the exposed T cells and B cells. B cells can differentiate into plasma cells which in turn can produce antibodies which selectively bind to the antigens.

[0056] In cancer, there are four general groups of tumor antigens: (i) viral tumor antigens which can be identical for any viral tumor of this type, (ii) carcinogenic tumor antigens which can be specific for patients and for the tumors, (iii) isoantigens of the transplantation type or tumor-specific transplantation antigens which can be different in all individual types of tumor but can be the same in different tumors; and (iv) embryonic antigens.

[0057] As a result of the discovery of tumor antigens, tumor antigens have become important in the development of cancer treatments that can specifically target the cancer. This has led to the development of antibodies and other antigen binding constructs directed against these tumor antigens.

[0058] In addition to the development of antibodies against tumor antigens for cancer treatment, antibodies that target immune cells to boost or otherwise modulate an immune response have also been developed. For example, an anti-CD40 antibody that is a CD40 agonist can be used to activate dendritic cells to enhance the immune response.

[0059] Cluster of Differentiation 40 (CD40) is a member of the Tumor Necrosis Factor Receptor (TNF-R) family. CD40 can be a 50 kDa cell surface glycoprotein that can be constitutively expressed in normal cells, such as monocytes, macrophages, B lymphocytes, dendritic cells, endothelial cells, smooth muscle cells, fibroblasts and epithelium, and in tumor cells, including B-cell lymphomas and many types of solid tumors. Expression of CD40 can be increased in antigen presenting cells in response to IL-1βp, IFN-γ, GM-CSF, and LPS induced signaling events.

[0060] Humoral and cellular immune responses can be regulated, in part, by CD40. For example, in the absence of CD40 activation by its cognate binding partner, CD40 Ligand (CD40L), antigen presentation can result in tolerance. However, CD40 activation can ameliorate tolerance. In addition, CD40 activation can positively impact immune responses by enhancing antigen presentation by antigen presenting cells (APCS), increasing cytokine and chemokine secretion, stimulating expression of and signaling by co-stimulatory molecules, and activating the cytolytic activity of different types of immune cells. Accordingly, the interaction between CD40 and CD40L can be essential to maintain proper humoral and cellular immune responses.

[0061] The intracellular effects of CD40 and CD40L interaction can include association of the CD40 cytoplasmic domain with TRAFs (TNF-R associated factors), which can lead to the activation of NFκB and Jun/AP1 pathways. While the response to activation of NFκB and Jun/AP1 pathways can be cell type-specific, often such activation can lead to increased production and secretion of cytokines, including IL-6, IL-8, IL-12, IL-15; increased production and secretion of chemokines, including MIP1α and β and RANTES; and increased expression of cellular adhesion molecules, including ICAM. While the effects of cytokines, chemokines and cellular adhesion molecules can be widespread, such effects can include enhanced survival and activation of T cells.

[0062] In addition to the enhanced immune responses induced by CD40 activation, CD40 activation can also be involved in chemokine- and cytokine-mediated cellular migration and differentiation; activation of immune cells, including monocytes; activation of and increased cytolytic activity of immune cells, including cytolytic T lymphocytes and natural killer cells; induction of CD40-positive tumor cell apoptosis and enhanced immunogenicity of CD40-positive tumors. In addition, CD40 can initiate and enhance immune responses by many different mechanisms, including, inducing antigen-presenting cell maturation and increased expression of costimulatory molecules, increasing production of and secretion of cytokines, and enhancing effector functions.

[0063] CD40 activation can be effective for inducing immune-mediated antitumor responses. For example, CD40 activation reverses host immune tolerance to tumor-specific antigens which leads to enhanced antitumor responses by T cells. Such antitumor activity can also occur in the absence of immune cells. Similarly, antitumor effects can occur in response to anti-CD40 antibody-mediated activation of CD40 and can be independent of or can involve antibody-dependent cellular cytotoxicity (ADCC). In addition to other CD40-mediated mechanisms of antitumor effects, CD40L-stimulation can cause dendritic cell maturation and stimulation. CD40L-stimulated dendritic cells can contribute to the antitumor response. Furthermore, vaccination strategies including CD40 can result in regression of CD40-positive and CD40-negative tumors.

[0064] CD40 activating antibodies (e.g., anti-CD40 activating monoclonal antibodies) can be useful for treatment of tumors. This can occur through one or more mechanisms, including cell activation, antigen presentation, production of cytokines and chemokines, amongst others. For example, CD40 antibodies activate dendritic cells, leading to processing and presentation of tumor antigens as well as enhanced immunogenicity of CD40-positive tumor cells. Not only can enhanced immunogenicity result in activation of CD40-positive tumor specific CD4⁺ and CD8⁺ T cells, but further antitumor activity can include, recruitment and activation monocytes, enhanced cytolytic activity of cytotoxic lymphocytes and natural killer cells as well as induction of apoptosis or by stimulation of a humoral response so as to directly target tumor cells. In addition, tumor cell debris, including tumor-specific antigens, can be presented to other cells of the immune system by CD40-activated antigen presenting cells.

[0065] Since CD40 can be important in an immune response, there is a need for enhanced CD40 meditated signaling events to provide reliable and rapid treatment options to patients suffering from diseases which may be ameliorated by treatment with CD40-targeted therapeutic strategies.

[0066] The CD40 mediated immune response can be further enhanced by targeting CD40 activation to the localized tumor site(s) through pairing with a tumor antigen binding domain. Such targeted CD40 activation and recruitment of immune cells to tumor cells may provide the advantage of maintaining therapeutic effectiveness with a lower dosage of a CD40 activating antibody construct or conjugate. A lower dosage may help mitigate any side effects of systemic CD40 activation such as cytokine release syndrome, which has been observed in some subjects treated with the agonistic CD40 monoclonal antibodies such as CP-870,893, dacetuzumab, Chi Lob 7/4, SEA-CD40, ADC-1013, 3C3, or 3G5. Systemic CD40 activation may also pose a risk of autoimmunity by causing APCs to break tolerance of autoantigens. For example, autoreactive T cells that manage to evade thymic selection may persist in the periphery in a state of tolerance against autoantigens, but CD40 activation can cause them to break tolerance and exhibit an autoimmune response. Accordingly, there is an important need for therapeutic, clinically relevant targeted CD40 activation that is enhanced at the localized tumor site relative to systemic activation. The presently described conjugates can be utilized to enhance the immune response. A conjugate can comprise an antigen binding domain, or a pair of antigen binding domains, and a CD40 binding domain, wherein the antigen binding domain(s) specifically binds a tumor antigen and the CD40 binding domain comprises a CD40 agonist. This combination of a tumor antigen binding domain(s) and a CD40 agonist can provide enhanced CD40 activation and recruitment of immune cells to the localized tumor site.

[0067] In addition to targeting immune cells to boost the immune response using anti-CD40 antibodies, antibodies that target other antigens expressed by immune cells can be used. For example, an anti-DEC205 antibody, an anti-CD36 mannose scavenger receptor 1 antibody, an anti-CLEC9A antibody, CLEC12A, an anti-DC-SIGN antibody, an anti-BDCA-2 antibody, an anti-OX40L antibody, an anti-41BBL antibody, an anti-CD204 antibody, an anti-MARCO antibody, an anti-CLEC5A antibody, an anti-Dectin 1 antibody, an anti-Dectin 2 antibody, an anti-CLEC10A antibody, an anti-CD206 antibody, an anti-CD64 antibody, an anti-CD32A antibody, an anti-CD16A antibody, an anti-HVEM antibody, an anti-PD-L1 antibody, an anti-CD32B antibody or an anti-CD47 antibody can be used to target, respectively, surface DEC-205, CD36 mannose scavenger receptor 1, CLEC9A, CLEC12A, DC-SIGN, BDCA-2, OX40L, 41BBL, CD204, MARCO, CLEC5A, Dectin 1, Dectin 2, CLEC10A, CD206, CD64, CD32A, CD16A, HVEM, PD-L1, or CD32B molecules expressed by antigen presenting cells or CD47 molecules expressed by T cells.

[0068] Cluster of Differentiation 205 (CD205 or DEC-205) is a member of the C-type multilectin family of endocytic receptors, which can include the macrophage mannose receptor (MMR) and the phospholipase A2 receptor (PLA₂R). DEC-205 can be a 205 kDa endocytic receptor highly expressed in cortical thymic epithelial cells, thymic medullary dendritic cells (CD11c⁺ CD8⁺), subpopulations of peripheral dendritic cells (CD11c⁺ CD8⁺). The DEC-205⁺ CD11c⁺ CD8⁺ dendritic cells (DCs) can function in cross-presentation of antigens derived from apoptotic cells. Additionally, DEC-205 can be significantly upregulated during DC maturation. DEC-205 can also be expressed at moderate levels in B cells and low levels in macrophages and T cells.

[0069] After antigen binding to DEC-205, the receptor-antigen complex can be internalized whereupon the antigen can be processed and be presented on the DC surface by a major histocompatibility complex class II (MHC II) or MHC class I. DEC-205 can deliver antigen to DCs for antigen presentation on MHC class II and cross-presentation on MHC class I. DEC-205 mediated antigen delivery for antigen presentation in DCs without an inflammatory stimulus can result in tolerance. Conversely, DEC-205 mediated antigen delivery in DCs in the presence of a maturational stimulus (e.g. a CD40 agonist) can result in long-term immunity via activation of antigen-specific CD4⁺ and CD8⁺ T cells.

[0070] CD36 mannose scavenger receptor 1 is an oxidized LDL receptor with two transmembrane domains located in the caveolae of the plasma membrane. It can be classified as a Class B scavenger receptor, which can be characterized by involvement in the removal of foreign substances and waste materials. This receptor can also be involved in cell adhesion, phagocytosis of apoptotic cells, and metabolism of long-chain fatty acids.

[0071] CLEC9A is a group V C-type lectin receptor. This receptor can be expressed as on myeloid lineage cells, and can be characterized as an activation receptor.

[0072] CLEC12A is a member of the C-type lectin/C-type lectin like domain super family that can be a negative regulator of granulocyte and monocyte function. It can also be involved in cell adhesion, cell-cell signaling, and glycoprotein turnover, and can play a role in the inflammatory response.

[0073] Dendritic cell-specific inter cellular adhesion molecule-3-grabbing non-integrin (DC-SIGN) or CD209, is a C-type lectin receptor that can be expressed on the surface of macrophages and dendritic cells. This receptor can recognize and bind to mannose type carbohydrates and be involved in activating phagocytosis, can mediate dendritic cell rolling, and can be involved in CD4+ T cell activation.

[0074] BDCA-2 is a C-type lectin that is a membrane protein of plasmacytoid dendritic cells. It can be involved in plasmacytoid dendritic cell function, such as ligand internalization and presentation.

[0075] OX40L, which can also be referred to as CD252, is the ligand for CD134 that can be expressed on dendritic cells. It can be involved in T cell activation.

[0076] 41BBL, which can also be referred to as CD137L, is a member of the TNF superfamily, and can be expressed on B cells, dendritic cells, activated T cells, and macrophages. It can provide co-stimulatory signal for T cell activation and expansion.

[0077] CD204, which can also be referred to as macrophage scavenger receptor 1, is a macrophage scavenger receptor receptor. The gene for CD204 can encode three different class A macrophage scavenger receptor isoforms. The type 1 and type 2 isoforms can be involved in binding, internalizing, and processing negatively charged macromolecules, such as low density lipoproteins. The type 3 isoform can undergo altered intracellular processing in which it can be retained within the endoplasmic reticulum, and has been shown to have a dominant negative effect on the type 1 and type 2 isoforms.

[0078] Macrophage receptor with collagenous structure (MARCO), which can also be referred to as SCARA2, is a class A scavenger receptor with collagen-like and cysteine-rich domains. It can be expressed in macrophages, and can bind to modified low density lipoproteins. It can be involved in the removal of foreign substances and waste materials.

[0079] C-type lectin domain family 5 member A (CLEC5A) is a C-type lectin. It can be involved in the myeloid lineage activating pathway.

[0080] Dendritic cell-associated c-type lectin-1 (Dectin 1), which can also be referred to as CLEC7A, is member of the C-type lectin/C-type lectin-like super family. It can be expressed by myeloid dendritic cells, monocytes, macrophages, and B cells, and can be involved in antifungal immunity.

[0081] Dendritic cell-associated c-type lectin-2 (Dectin 2), which can also be referred to as CLEC6A, is member of the C-type lectin/C-type lectin-like super family. It can be expressed by dendritic cells, macrophages, monocytes and neutrophils. It can be involved in antifungal immunity.

[0082] CLEC10A, which can also be referred to as CD301, is member of the C-type lectin/C-type lectin-like super family. It can be expressed by dendritic cells, monocytes, and CD33+ myeloid cells, and can be involved in macrophage adhesion and migration.

[0083] CD206, which can also be referred to as macrophage mannose receptor, is a C-type lectin type I membrane glycoprotein. It can be expressed on dendritic cells, macrophages and endothelial cells, and can act as a pattern recognition receptor and bind high-mannose structures of viruses, bacteria, and fungi.

[0084] CD64, which can also be referred to as FcγRI, is a high affinity Fc receptor for IgG. It can be expressed by monocytes and macrophages. It can be involved in mediating phagocytosis, antigen capture, and antibody dependent cell-mediated cytoxicity.

[0085] CD32A, which can also be referred to as FcγRIIa, is a low affinity Fc receptor. It can be expressed on monocytes, granulocytes, B cells, and eosinophils. It can be involved in phagocytosis, antigen capture, and antibody dependent cell-mediated cytoxicity.

[0086] CD16A, which can also be referred to as FcγRIIIa, is low affinity Fc receptor. It can be expressed on NK cells, and can be involved in phagocytosis and antibody dependent cell-mediated cytotoxicity.

[0087] Herpesvirus entry mediator (HVEM), which can also be referred to as CD270, is a member of the TNF-receptor superfamily. It can be expressed on B cells, dendritic cells, T cells, NK cells, CD33+ myeloid cells, and monocytes. It can be involved in activating the immune response.

[0088] CD32B, which can also be referred to as FcγRIIb, is a low affinity Fc receptor. It can be expressed on B cells and myeloid dendritic cells. It can be involved in inhibiting maturation and cell activation of dendritic cells.

[0089] The HER2/neu (human epidermal growth factor receptor 2/receptor tyrosine-protein kinase erbB-2) is part of the human epidermal growth factor family. Overexpression of this protein can be shown to play an important role in the progression of cancer, for example, breast cancer. The HER2/neu protein can function as a receptor tyrosine kinase and autophosphorylates upon dimerization with binding partners. HER2/neu can activate several signaling pathways including, for example, mitogen-activated protein kinase, phosphoinositide 3-kinase, phospholipase Cy, protein kinase C, and signal transducer and activator of transcription (STAT). Examples of antibodies that can target and inhibit HER2/neu can include trastuzumab and pertuzumab.

[0090] EGFR (epidermal growth factor receptor) encodes a member of the human epidermal growth factor family. Mutations that can lead to EGFR overexpression or over activity can be associated with a number of cancers, including squamous cell carcinoma and glioblastomas. EGFR can function as a receptor tyrosine kinase and ligand binding can trigger dimerization with binding partners and autophosphorylation. The phosphorylated EGFR can then activate several downstream signaling pathways including mitogen-activated protein kinase, phosphoinositide 3-kinase, phospholipase Cy, protein kinase C, and signal transducer and activator of transcription (STAT). Examples of antibodies that can target and inhibit EGFR can include cetuximab, panutumumab, nimotuzumab, and zalutumumab.

[0091] One mutant variant of EGFR is EGFRvIII (epidermal growth factor receptor variant III). EGFRvIII can be the result of an EGFR gene rearrangement in which exons 2-7 of the extracellular domain are deleted. This mutation can result in a mutant receptor incapable of binding to any known ligand. The resulting receptor can engage in a constitutive low-level signaling and can be implicated in tumor progression. Examples of antibodies that can target EGFRvIII can include AMG595 and ABT806.

[0092] C-Met (hepatocyte growth factor receptor) encodes a member of the receptor tyrosine kinase family of proteins. C-Met overexpression and over activity can be implicated in various cancers including lung adenocarcinomas, and high c-Met levels can be associated with poor patient outcome. Binding of hepatocyte growth factor can induce dimerization and autophosphorylation of c-Met. The c-Met receptor can activate various downstream signaling pathways including mitogen-activated protein kinase, phosphoinositide 3-kinase, and protein kinase C pathways. The antibody onartuzumab can target and inhibit c-Met.

[0093] HER3 (human epidermal growth factor receptor 3) encodes a member of the human epidermal growth factor receptor family. Ligand binding can induce dimerization and autophosphorylation of cytoplasmic tyrosine residues that then can recruit signaling proteins for downstream signaling pathway activation including mitogen-activated protein kinase and phosphoinoside 3-kinase pathways. HER3 can play an active role in cell proliferation and survival, and can be overexpressed, overactive, and/or mutated in various cancers. For example, HER3 can be overexpressed in breast, ovarian, prostate, colon, pancreas, stomach, oral, and lung cancers. The antibody patritumab can target and inhibit HER3.

[0094] MUC1 (mucin 1, cell surface associated) encodes a member of the mucin family of glycosylated proteins that can play an important role in cell adhesion and forming protective mucosal layers on epithelial surfaces. MUC1 can be proteolytically cleaved into alpha and beta subunits that form a heterodimeric complex with the N-terminal alpha subunit providing cell-adhesion functionality and the C-terminal beta subunit modulating cell signaling pathways including the mitogen activated map kinase pathway. MUC1 can play a role in cancer progression, for example, by regulating TP53-mediated transcription. MUC1 overexpression, aberrant intracellular localization, and glycosylation changes can all be associated with carcinomas including pancreatic cancer cells. The antibody clivatuzumab can target MUC1.

[0095] MUC16 (mucin 16, cell surface associated) encodes the largest member of the mucin family of glycosylated proteins that can play an important role in cell adhesion and forming protective mucosal layers on epithelial surfaces. MUC16 can be a highly glycosylated 2.5MDa transmembrane protein that can provide a hydrophilic lubricating barrier on epithelial cells. The cytoplasmic tail of MUC16 can be involved with various signaling pathways including the JAK2-STAT3 and Src kinase pathways. A peptide epitope of MUC16 can be used as biomarker for detecting ovarian cancer. Elevated expression of MUC16 can be present in advanced ovarian cancers and pancreatic cancers. The antibody sofituzumab can target MUC16.

[0096] EPCAM (epithelial cell adhesion molecule) encodes a transmembrane glycoprotein that can be frequently and highly expressed in carcinomas and tumor-initiating cells. EPCAM can also be a pluripotent stem cell marker. EPCAM can modulate a variety of pathways including cell-cell adhesion, cellular proliferation, migration, invasion, maintenance of a pluripotent state, and differentiation in the context of tumor cells. The antibodies edrecolomab and adecatumumab can target EPCAM.

[0097] MSLN (mesothelin) encodes a 40 kDa cell GPI-anchored membrane surface protein believed to function in cell adhesion. MSLN is overexpressed in mesothelioma and certain types of pancreatic, lung, and ovarian cancers. MSLN-related peptides that circulate in serum of patients suffering from pleural mesothelioma are used as biomarkers for monitoring the disease. MSLN may promote metastasis by inducing matrix metalloproteinase 7 and 9 expression. The monoclonal antibody anetumab has been developed to target MSLN.

[0098] CA6 (carbonic anhydrase VI) encodes one of several isozymes of carbonic anhydrase. CA6 is found in salivary glands and may play a role in the reversible hydration of carbon dioxide. CA6 is expressed in human serous ovarian adenocarcinomas. The monoclonal antibody huDS6 has been developed to target CA6.

[0099] NAPI2B (sodium/phosphate cotransporter 2B) encodes a type II sodium-phosphate cotransporter. NAPI2B is highly expressed on the tumor surface in lung, ovarian, and thyroid cancers as well as in normal lung pneumocytes. The monoclonal antibody lifastuzumab has been developed to target NAPI2B.

[0100] TROP2 (trophoblast antigen 2) encodes a transmembrane glycoprotein that acts as an intracellular calcium signal transducer. TROP2 binds to multiple factors such as IGF-1, claudin-1, claudin-7, cyclin D1, and PKC. TROP2 including intracellular calcium signaling and the mitogen activated protein kinase pathway. TROP2 plays a role in cell self-renewal, proliferation, invasion, and survival. Discovered first in trophoblast cells that have the ability to invade uterine decidua during placental implantation, TROP2 overexpression has been shown to be capable of stimulating cancer growth. TROP2 overexpression has been observed in breast, cervix, colorectal, esophagus, lung, non-Hodgkin's lymphoma, chronic lymphocytic lymphoma, Raji Burkitt lymphoma, oral squamous cell, ovarian, pancreatic, prostate, stomach, thyroid, urinary bladder, and uterine carcinomas. The monoclonal antibody sactuzumab has been developed to target TROP2.

[0101] CEA (carcinoembryonic antigen) encodes a family of related glycoproteins involved in cell adhesion. CEA is a biomarker for gastrointestinal cancers and may promote tumor development by means of its cell adhesion function. CEA levels have been found to be elevated in serum of individuals with colorectal carcinoma. CEA levels have also been found to be elevated in gastric carcinoma, pancreatic carcinoma, lung carcinoma, breast carcinoma, and medullary thyroid carcinoma. The monoclonal antibodies PR1A3 and Ab2-3 have been developed to target CEA.

[0102] CLDN18.2 (claudin 18) encodes a member of the claudin family of integral membrane proteins. CLDN18.2 is a component of tight junctions that create a physical barrier to prevent diffusion of solutes and water through the paracellular space between epithelial cells. CLDN18.2 is overexpressed in infiltrating ductal adenocarcinomas, but is reduced in some gastric carcinomas. The monoclonal antibody claudiximab has been developed to target CLDN18.2.

[0103] FAP (fibroblast activation protein, alpha) encodes a homodimeric integral membrane protein from a family of serine proteases. FAP is believed to play a role in many processes including tissue remodeling, fibrosis, wound healing, inflammation, and tumor growth. FAP enhances tumor growth and invasion by promoting angiogenesis, collagen fiber degradation and apoptosis, and by downregulating the immune response. FAP is selectively expressed on fibroblasts within the tumor stroma. The monoclonal antibody sibrotuzumab has been developed to target FAP.

[0104] EphA2 (EPH Receptor A2) encodes a member of the ephrin receptor subfamily of the protein-tyrosine kinase family. EphA2 binds to ephrin-A ligands. Activation of EphA2 receptor upon ligand binding can result in modulation of migration, integrin-mediated adhesion, proliferation, and differentiation. EphA2 is overexpressed in various cancers including breast, prostate, urinary bladder, skin, lung, ovarian, and brain cancers. High EphA2 expression is also correlated with poor prognosis. The monoclonal antibodies DS-8895a opt1, DS-8895 opt2, and MEDI-547 have been developed to target EphA2.

[0105] RON (macrophage stimulating 1 receptor) encodes a cell surface receptor for macrophage stimulating protein (MSP) with tyrosine kinase activity and belongs to the MET proto-oncogene family. RON has significant structural similarity and sequence identity with the cancer-related gene C-MET. RON plays a significant role in KRAS oncogene addiction and has also been shown to be overexpressed in pancreatic cancers. Altered Ron expression and activation has been associated with decreased survival and cancer progression in various cancers including gastric, colon, breast, bladder, renal cell, ovarian, and hepatocellular cancers. The monoclonal antibody narnatumab has been developed to target RON.

[0106] LY6E (lymphocyte antigen 6 complex, locus E) encodes an interferon alpha-inducible GPI-anchored cell membrane protein. LY6E is overexpressed in numerous cancers including lung, gastric, ovarian, breast, kidney, pancreatic, and head and neck carcinomas. The monoclonal antibody RG7841 has been developed to target LY6E.

[0107] FRA (folate receptor alpha) encodes a GPI-anchored cell surface glycoprotein. FRA binds folic acid, a molecule needed for cell growth and DNA synthesis, and mediates its internalization via receptor-mediated endocytosis. FRA is overexpressed in various cancers including prostate, breast, ovarian, pancreatic, mesothelioma, non-small cell lung carcinoma, and head and neck cancer. FRA expression has also been found to enhance tumor cell proliferation. The monoclonal antibodies farletuzumab and mirvetuximab have been developed to target FRA.

[0108] PSMA (prostate specific membrane antigen) is a type II transmembrane glycoprotein belonging to the M28 peptidase family that is expressed in all types of prostate tissues. PSMA is upregulated in cancer cells within the prostate and is used as a marker for prostate cancer. PSMA expression may also serve as a predictor of disease recurrence in prostate cancer patients. The monoclonal antibodies J591 variant 1 and J591 variant 2 have been developed to target PSMA.

[0109] DLL3 (delta-like 3) encodes a ligand in the Notch signaling pathway that is associated with neuroendocrine cancer. DLL3 is most highly expressed in the fetal brain and is involved in somitogenesis in the paraxial mesoderm. DLL3 is expressed on tumor cell surfaces but not in normal tissues. The monoclonal antibody rovalpituzumab has been developed to target DLL3.

[0110] PTK7 (tyrosine protein kinase-like 7) encodes a receptor tyrosine kinase that lacks catalytic tyrosine kinase activity but is nevertheless capable of signal transduction. PTK7 interacts with the WNT signaling pathway, which itself has important roles in epithelial mesenchymal transition and various cancers such as breast cancer. PTK7 overexpression has been associated with patient prognosis depending on the cancer type. The monoclonal antibodies PF-06647020 and the anti-PTK7 antibody described by SEQ ID NO 341 and 346 have been developed to target PTK7.

[0111] LIV1 (LIV-1 protein, estrogen regulated) encodes a member of the LIV-1 subfamily of ZIP (Zrt-, Irt-like proteins) zinc transporters. LIV1 is an estrogen regulated protein that transports zinc and/or other ions across the cell membrane. Elevated levels of LIV1 have been shown in estrogen receptor positive breast cancers, and LIV1 is used as a marker of ER-positive cancers. LIV1 has also been implicated as a downstream target of the STAT3 transcription factor and as playing an essential role in the nuclear localization of the Snail transcription factor that modulates epithelial-to-mesenchymal transition. The monoclonal antibody of SGN-LIV1A, ladiratuzumab, has been developed to target LIV1.

[0112] ROR1 (receptor tyrosine kinase-like orphan receptor 1) encodes a member of the ROR family of orphan receptors. ROR1 has been found to bind Wnt5a, a non-canonical Wnt via a Frizzled domain (FZD), and plays an important role in skeletal, cardiorespiratory, and neurological development. ROR1 expression is predominantly restricted to embryonic development and is absent in most mature tissues. In contrast, ROR1 expression is upregulated in B-Cell chronic lymphocytic leukemia, acute lymphocytic leukemia, non-Hodgkin lymphoma, and myeloid malignancies. The monoclonal antibody cirmtuzumab has been developed to target ROR1.

[0113] MAGE-A3 (melanoma-associated antigen 3) encodes a member of the melanoma-associated antigen gene family. The function of MAGE-A3 is not known, but its elevated expression has been observed in various cancers including melanoma, non-small cell lung cancer, and in putative cancer stem cell populations in bladder cancer. The monoclonal antibody described by SEQ ID NO 371 and 376 has been developed to target MAGE-A3.

[0114] NY-ESO-1 (New York esophageal squamous cell carcinoma 1) encodes a member of the cancer-testis family of proteins. Cancer-testis antigen expression is normally restricted to testicular germ cells in adult tissues, but has been found to be aberrantly expressed in various tumors including soft tissue sarcomas, melanoma, epithelial cancers, and myxoid and round cell liposarcomas. The monoclonal antibody described by SEQ ID NO 381 and 386 has been developed to target NY-ESO-1.

### Conjugates

[0115] The presently described immune modulatory conjugates (also referred to as antibody conjugates) can be utilized as strategy to enhance or otherwise modulate immune responses. A conjugate typically comprises an antibody construct and at least one immune-modulatory agent, optionally each immune-modulatory agent is attached to the antibody construct via a linker. An antibody contruct can comprise at least one binding domain (e.g., a first binding domain), typically at least two antigen binding domains, and optionally additional antigen binding domains (e.g., a third antigen binding domain, and a fourth antigen binding domain) and an Fc domain. In some embodiments, an antibody construct comprises a first antigen binding domain attached to an Fc domain. In some embodiments, an antibody construct can comprise a first antigen binding domain, a second antigen binding domain and an Fc domain, where each antigen binding domain is attached to the Fc domain. In some embodiments, a conjugate can comprise an antibody construct having a first antigen binding domain, a second antigen binding domain and an Fc domain, the first and second antigen binding domains attached to the Fc domain, and at least one immune-modulatory agent, optionally each immune-modulatory agent attached to the antibody construct via a linker.

[0116] In some embodiments, an antibody construct can comprise a first antigen binding domain, a second antigen binding domain, a third antigen binding domain and an Fc domain. The first antigen binding domain and the second antigen binding domain are attached to the Fc domain, and the third antigen binding domain is attached to a C-terminal end of a light chain of the first binding domain, to the C-terminal end of a light chain of the second binding domain or the C-terminal end of the Fc domain.

[0117] In some embodiments, the linker that attaches an immune-modulatory agent to an antibody construct has a protease-cleavage site that is cleavable by proteases present in the microenvironment of the disease. In some embodiments, the Fc domain of the antibody construct has an altered binding affinity for at least one Fc receptor, such as an Fc gamma receptor(s) or FcRn, allowing selective delivery of an immune-modulatory agent to certain immune cells.

[0118] These and other embodiments are described herein.

### Binding Domains

[0119] An antibody construct of a conjugate can contain one or more antigen binding domains (also referred to as binding domains). In some embodiments, an antibody construct has a first binding domain. In some embodiments, an antibody construct has a first and a second binding domain that bind to the same antigen. In some embodiments, an antibody construct has a first and a second binding domain that bind to different antigens. In some embodiments, an antibody construct has a first and a second binding domain, and optionally a third binding domain.

[0120] A binding domain typically recognizes a single antigen. An antibody contruct of a conjugate can have binding domains that can recognize, for example, two, three, four, five, six, seven, eight, nine, ten, or more antigens. An antibody construct can comprise two binding domains in which each binding domain can recognize the same antigen. An antibody construct can comprise two binding domains in which each binding domain can recognize a different antigen. An antibody construct can comprise three binding domains in which each binding domain can recognize a different antigen. An antibody construct can comprise three binding domains in which two of the binding domains can recognize the same antigen and the third binding domain recognizes a different antigen. In some embodiments, an antibody construct is bivalent and mono-specific (i.e., having two binding domains that specifically bind to the same antigen). In embodiments in which an antibody construct is trivalent or greater, the antibody construct is typically bi-specific or greater. Antibody constructs having a third binding domain attached to the C-terminal end of a light chain and/or the C-terminal end of an Fc domain can be bi-specific, tri-specific or multi-specific.

[0121] In some embodiments, an antibody construct can be a fusion protein, such as an Fc fusion protein, having a first binding domain and optionally a second binding domain. In some embodiments, two antigen binding domains and an Fc domain can be expressed as a fusion protein, optionally formed by expression of separate polypeptide chains.

[0122] A binding domain can specifically bind to an antigen on a cell surface or to a fragment thereof. A binding domain can specifically bind an antigen on a cell surface, for example, on a tumor cell, on an antigen presenting cell such as a dendritic cell or macrophage, or on another immune cell such as a T cell. In some embodiments, a binding domain can specifically bind to an antigen on a cell surface of a tumor cell or an antigen presenting cell (such as a dendritic cell or macrophage), but not on other immune cells such as T cells. In some embodiments, a binding domain can specifically bind to a tumor antigen. In some embodiments, a binding domain can specifically bind to an antigen on an antigen presenting cell. In some embodiments, a binding domain can be a cell surface receptor agonist, such as an agonistic antibody.

[0123] A binding domain can be an antigen-binding portion of an antibody (an antigen bind domain) or an antigen binding antibody fragment. A binding domain can be one or more fragments of an antibody that can retain the ability to specifically bind to an antigen. A binding domain can be in a scaffold, in which a scaffold is a supporting framework for the binding domain. A binding domain, such as an antigen binding fragment of an antibody, can be in an antibody scaffold or antibody-like scaffold. A binding domain can be in a non-antibody scaffold.

[0124] Antibody constructs can comprise a binding domain(s) that can specifically bind to a tumor antigen. A tumor antigen can be a tumor specific antigen and/or a tumor associated antigen. As described herein, a “tumor antigen” refers to a molecular marker that can be expressed on a neoplastic tumor cell and/or within a tumor microenvironment. The molecular marker can be a cell surface receptor. For example, a tumor antigen antigen can be an antigen expressed on a cell associated with a tumor, such as a neoplastic cell, stromal cell, endothelial cell, fibroblast, or tumor-infiltrating immune cell. For example, the tumor antigen antigen Her2/Neu can be overexpressed by certain types of breast and ovarian cancer. A tumor antigen can also be ectopically expressed by a tumor and contribute to deregulation of the cell cycle, reduced apoptosis, metastasis, and/or escape from immune surveillance. Tumor antigens are generally proteins or polypeptides derived therefrom, but can be glycans, lipids, or other small organic molecules. Additionally, a tumor antigen can arise through increases or decreases in post-translational processing exhibited by a cancer cell compared to a normal cell, for example, protein glycosylation, protein lipidation, protein phosphorylation, or protein acetylation.

[0125] In certain embodiments, a binding domain can specifically bind to a tumor antigen, such as, for example, GD2, GD3, GM2, Le^{y}, sLe, polysialic acid, fucosyl GM1, Tn, STn, BM3, or GloboH. In certain embodiments, a binding domain specifically can bind to a tumor antigen having an amino acid sequence having at least 80%, 90%, 95%, 97%, 98%, 99% or 100% identity to the amino acid sequence of CD5, CD19, CD20, CD25, CD37, CD30, CD33, CD45, CAMPATH-1, BCMA, CS-1, PD-L1, B7-H3, B7-DC (PD-L2), HLA-DR, carcinoembryonic antigen (CEA), TAG-72, MUC1, MUC15, MUC16, folate-binding protein, A33, G250, prostate-specific membrane antigen (PSMA), CA-125, CA19-9, epidermal growth factor, HER2, IL-2 receptor, EGFRvIII (de2-7 EGFR), EGFR, fibroblast activation protein (FAP), tenascin, a metalloproteinase, endosialin, vascular endothelial growth factor, βvβ3, WT1, LMP2, HPV E6, HPV E7, p53 nonmutant, NY-ESO-1, GLP-3, MelanA/MART1, Ras mutant, gp100, p53 mutant, PR1, bcr-abl, tyrosinase, survivin, PSA, hTERT, STN1, TNC, a Sarcoma translocation breakpoint fusion protein, EphA2, PAP, ML-IAP, AFP, ERG, NA17, PAX3, ALK, androgen receptor, cyclin B1, MYCN, RhoC, TRP-2, mesothelin (MSLN), PSCA, MAGE A1, MAGE-A3, CYP1B1, PLAV1, BORIS, Tn, ETV6-AML, NY-BR-1, RGS5, SART3, Carbonic anhydrase IX, PAX5, OY-TES1, Sperm protein 17, LCK, MAGE C2, MAGE A4, GAGE, TRAIL1, HMWMAA, AKAP-4, SSX2, XAGE 1, B7H3, Legumain, Tie 3, PAGE4, VEGFR2, MAD-CT-1, PDGFR-B, MAD-CT-2, ROR2, CMET, HER3, EPCAM, CA6, NAPI2B, TROP2, Claudin-6 (CLDN6), Claudin-16 (CLDN16), CLDN18.2, RON, LY6E, FRA, DLL3, PTK7, Uroplakin-1B (UPK1B), LIV1, ROR1, STRA6, TMPRSS3, TMPRSS4, TMEM238, Clorf186, Fos-related antigen 1, VEGFR1, endoglin, VTCN1 (B7-H4), VISTA, or a fragment thereof.

[0126] In certain embodiments, an antigen binding domain specifically binds to a tumor antigen, such as those selected from CD5, CD25, CD37, CD33, CD45, BCMA, CS-1, PD-L1, B7-H3, B7-DC (PD-L2), HLD-DR, carcinoembryonic antigen (CEA), TAG-72, EpCAM, MUC1, folate-binding protein (FOLR1), A33, G250 (carbonic anhydrase IX), prostate-specific membrane antigen (PSMA), GD2, GD3, GM2, Ley, CA-125, CA19-9 (MUC1 sLe(a)), epidermal growth factor, HER2, IL-2 receptor, EGFRvIII (de2-7 EGFR), fibroblast activation protein (FAP), a tenascin, a metalloproteinase, endosialin, αvβ3, LMP2, EphA2, PAP, AFP, ALK, polysialic acid, TRP-2, fucosyl GM1, mesothelin (MSLN), PSCA, sLe(a), GM3, BORIS, Tn, TF, GloboH, STn, CSPG4, AKAP-4, SSX2, Legumain, Tie 2, Tim 3, VEGFR2, PDGFR-B, ROR2, TRAIL1, MUC16, EGFR, CMET, HER3, MUC1, MUC15, CA6, NAPI2B, TROP2, CLDN18.2, RON, LY6E, FRAlpha, DLL3, PTK7, LIV1, ROR1, CLDN6, GPC3, ADAM12, LRRC15, CDH6, TMEFF2, TMEM238, GPNMB, ALPPL2, UPK1B, UPK2, LAMP-1, LY6K, EphB2, STEAP, ENPP3, CDH3, Nectin4, LYPD3, EFNA4, GPA33, SLITRK6 or HAVCR1.

[0127] In certain embodiments, an antigen binding domain specifically binds to an antigen associated with fibrotic or inflammatory disease, such as those selected from Cadherin 11, PDPN, LRRC15, Integrin α4β7, Integrin α2β1, MADCAM, Nephrin, Podocin, IFNAR1, BDCA2, CD30, c-KIT, FAP, CD73, CD38, PDGFRβ, Integrin αvβ1, Integrin αvβ3, Integrin αvβ8, GARP, Endosialin, CTGF, Integrin αvβ6, CD40, PD-1, TIM-3, TNFR2, DEC205, DCIR, CD86, CD45RB, CD45RO, MHC Class II, CD25, LRRC15, MMP14, GPX8, and F2RL2.

[0128] A binding domain of an antibody construct can be selected from any domain that specifically binds to an antigen, including a binding domain of an antibody or a non-antibody binding domain. A binding domain of an antibody can be a monoclonal antibody, a polyclonal antibody, a recombinant antibody, or an antigen binding fragment thereof, for example, a heavy chain variable domain (VH) and a light chain variable domain (VL). A binding domain of a non-antibody scaffold can be a lipocalin, an anticalin, ‘T-body’, a peptide (e.g., a Bicycle™ peptide), an affibody, a peptibody, a DARPin, an affimer, an avimer, a knottin, a monobody, an affinity clamp, an ectodomain, a receptor ectodomain, a receptor, a cytokine, a ligand, an immunocytokine, a centryin, a T-cell receptor, or a recombinant T-cell receptor. In some embodiments, a binding domain of a non-antibody scaffold can be a lipocalin, an anticalin, ‘T-body’, an affibody, a peptide (e.g., a Bicycle™ peptide) a peptibody, a DARPin, an affimer, an avimer, a knottin, a monobody, a centryin or an affinity clamp.

[0129] In some embodiments, an antigen binding domain is other than an antibody or antigen binding fragment thereof, such as a bicyclic peptide (e.g., a Bicycle®), as described in Published International Application No. WO2014/140342, WO2013/050615, WO2013/050616, and WO2013/050617 (the disclosures of which are incorporated by reference herein).

[0130] In some embodiments, a binding domain of an antibody construct is an antigen binding domain from a monoclonal antibody and can comprise a light chain and a heavy chain. In an aspect, the monoclonal antibody binds to a tumor antigen comprises the light chain of a tumor antigen antibody and the heavy chain of a tumor antigen antibody, which specifically bind to the tumor antigen. In another aspect, the monoclonal antibody binds to an antigen present on the surface of an immune cell (immune cell antigen) and comprises the light chain of an anti-immune cell antigen antibody and the heavy chain of an anti-immune cell antigen antibody, which specifically bind to an immune cell antigen. In another aspect, the monoclonal antibody specifically binds to an antigen present on the surface of an antigen presenting cell (APC antigen) and comprises the light chain of an anti-APC antigen antibody and the heavy chain of an anti-APC antigen antibody, which bind an APC antigen.

[0131] In some embodiments, an antibody construct can comprise an antibody, such as a bivalent, mono-specific antibody. An antibody can consist of two identical light protein chains (light chains) and two identical heavy protein chains (heavy chains), all held together covalently by interchain disulfide linkages. The N-terminal regions of the light and heavy chains together can form the antigen recognition site of the antibody. Structurally, various functions of an antibody can be confined to discrete protein domains or regions. The portions that can recognize and can specifically bind to an antigen consist of three complementarity determining regions (CDRs) that lie within the variable heavy chain regions and variable light chain regions at the N-terminal ends of the heavy and light chains. The constant domains provide the general framework of the antibody and may not be involved directly in binding the antibody to an antigen, but can be involved in various effector functions, such as participation of the antibody in antibody-dependent cellular cytotoxicity (ADCC).

[0132] In some embodiments, an antibody construct comprises an antigen binding domain of an antibody that includes the light chain (LC) CDRs (LCDRs) and (HC) CDRs (HCDRs) of the antibody. For example, an antigen binding domain of an antibody can comprise one or more of the following: a light chain complementary determining region 1 (LCDR1), a light chain complementary determining region 2 (LCDR2), or a light chain complementary determining region 3 (LCDR3). As another example, an antibody binding domain can comprise one or more of the following: a heavy chain complementary determining region 1 (HCDR1), a heavy chain complementary determining region 2 (HCDR2), or a heavy chain complementary determining region 3 (HCDR3). In some embodiments an antigen binding domain comprises all of the following: LCDR1, LCDR2, LCDR3, HCDR1, HCDR2 and HCDR3. Unless stated otherwise, the CDRs described herein are defined according to the IMGT (the international ImMunoGeneTics information system) or the Kabat numbering system. In some embodiments, an antigen binding domain can comprise only the heavy chain of an antibody (e.g., does not include the light chain(s)). In some embodiments, an antigen binding domain can comprise only the light chain of an antibody (e.g., does not include the heavy chain(s)). In some embodiments, an antigen binding domain can comprise only the variable region of the heavy chain of an antibody. In some embodiments, an antigen binding domain can comprise only the variable region of the light chain of an antibody.

[0133] An antibody construct can also comprise any antigen binding fragment of an antibody or recombinant form thereof, including but not limited to an scFv, Fab, Fab′, Fab2, variable Fv fragment (Fv), domain antibody, and any other fragment thereof that can specifically bind to an antigen.

[0134] An antibody used herein can be chimeric or “humanized.” Humanized forms of non-human (e.g., murine) antibodies can be chimeric immunoglobulins, immunoglobulin chains or fragments thereof (such as Fv, Fab, Fab′, F(ab′)2 scFv, variable Fv fragment (Fv), domain antibody or other antigen-binding subdomains of antibodies), that contain minimal sequences derived from non-human immunoglobulin (e.g., the CDRs). In general, a humanized antibody can comprise substantially all of at least one, and typically two, variable domains, in which all or substantially all of the CDRs correspond to those of a non-human immunoglobulin and all or substantially all of the framework regions (FR) are those of a human immunoglobulin sequence. The humanized antibody can also comprise at least a portion of an immunoglobulin constant region (Fc), typically that of a human immunoglobulin consensus sequence.

[0135] An antibody also can be a human antibody. As used herein, “human antibodies” include antibodies having, for example, the amino acid sequence of a human immunoglobulin and include antibodies isolated from human immunoglobulin libraries or from animals transgenic for one or more human immunoglobulins that do not express endogenous immunoglobulins. Human antibodies can be produced using transgenic mice which are incapable of expressing functional endogenous immunoglobulins, but which can express human immunoglobulin genes.

[0136] Completely human antibodies that recognize a selected epitope can be generated using guided selection. In this approach, a selected non-human monoclonal antibody, e.g., a mouse antibody, is used to guide the selection of a completely human antibody recognizing the same epitope

[0137] An antibody can be a bispecific antibody or a dual variable domain antibody (DVD). Bispecific and DVD antibodies are monoclonal, often human or humanized, antibodies that have binding specificities for at least two different antigens (e.g., bi-specific).

[0138] An antibody described herein can be a derivatized antibody. For example, derivatized antibodies can be modified by glycosylation, acetylation, pegylation, phosphorylation, amidation, derivatization by known protecting/blocking groups, proteolytic cleavage, or the like. An antibody can also be modified, such as by defucosylation or deglycosylation.

[0139] A binding domain of an antibody construct can bind to tumor cells, such as an antibody against a cell surface receptor or a tumor antigen.

[0140] In some embodiments, an antibody construct can comprise a first binding domain or a first and second binding domain that specifically bind(s) to a tumor antigen. In some embodiments, a binding domain specifically can bind to a tumor antigen such as GD2, GD3, GM2, Le^{y}, sLe, polysialic acid, fucosyl GM1, Tn, STn, BM3, or GloboH. In some embodiments, a binding domain specifically can bind to a tumor antigen having an amino acid sequence comprising at least 80%, 90%, 95%, 97%, 98%, 99% or 100% identity to the amino acid sequence of CD5, CD19, CD20, CD25, CD37, CD30, CD33, CD45, CAMPATH-1, BCMA, CS-1, PD-L1, B7-H3, B7-DC (PD-L2), HLA-DR, carcinoembryonic antigen (CEA), TAG-72, MUC1, MUC15, MUC16, folate-binding protein, A33, G250, prostate-specific membrane antigen (PSMA), STN1, TNC, CA-125, CA19-9, epidermal growth factor, HER2, IL-2 receptor, EGFRvIII (de2-7 EGFR), EGFR, fibroblast activation protein (FAP), tenascin, a metalloproteinase, endosialin, vascular endothelial growth factor, αvβ3, WT1, LMP2, HPV E6, HPV E7, p53 nonmutant, NY-ESO-1, GLP-3, MelanA/MART1, Ras mutant, gp100, p53 mutant, PR1, bcr-abl, tyrosinase, survivin, PSA, hTERT, a Sarcoma translocation breakpoint fusion protein, EphA2, PAP, ML-IAP, AFP, ERG, NA17, PAX3, ALK, androgen receptor, cyclin B1, MYCN, RhoC, TRP-2, mesothelin (MSLN), PSCA, MAGE A1, MAGE-A3, CYP1B1, PLAV1, BORIS, Tn, ETV6-AML, NY-BR-1, RGS5, SART3, Carbonic anhydrase IX, PAX5, OY-TES1, Sperm protein 17, LCK, MAGE C2, MAGE A4, GAGE, TRAIL1, HMWMAA, AKAP-4, SSX2, XAGE 1, B7H3, Legumain, Tie 3, PAGE4, VEGFR2, MAD-CT-1, PDGFR-B, MAD-CT-2, ROR2, CMET, HER3, EPCAM, CA6, NAPI2B, TROP2, Claudin-6 (CLDN6), Claudin-16 (CLDN16), CLDN18.2, RON, LY6E, FRA, DLL3, PTK7, Uroplakin-1B (UPK1B), LIV1, ROR1, STRA6, TMPRSS3, TMPRSS4, TMEM238, Clorf186, Fos-related antigen 1, VEGFR1, endoglin, VTCN1 (B7-H4), VISTA, or a fragment thereof.

[0141] In certain embodiments, an antigen binding domain specifically binds to a tumor antigen, such as those selected from CD5, CD25, CD37, CD33, CD45, BCMA, CS-1, PD-L1, B7-H3, B7-DC (PD-L2), HLD-DR, carcinoembryonic antigen (CEA), TAG-72, EpCAM, MUC1, folate-binding protein (FOLR1), A33, G250 (carbonic anhydrase IX), prostate-specific membrane antigen (PSMA), GD2, GD3, GM2, Ley, CA-125, CA19-9 (MUC1 sLe(a)), epidermal growth factor, HER2, IL-2 receptor, EGFRvIII (de2-7 EGFR), fibroblast activation protein (FAP), a tenascin, a metalloproteinase, endosialin, avB3, LMP2, EphA2, PAP, AFP, ALK, polysialic acid, TRP-2, fucosyl GM1, mesothelin (MSLN), PSCA, sLe(a), GM3, BORIS, Tn, TF, GloboH, STn, CSPG4, AKAP-4, SSX2, Legumain, Tie 2, Tim 3, VEGFR2, PDGFR-B, ROR2, TRAIL1, MUC16, EGFR, CMET, HER3, MUC1, MUC15, CA6, NAPI2B, TROP2, CLDN18.2, RON, LY6E, FRAlpha, DLL3, PTK7, LIV1, ROR1, CLDN6, GPC3, ADAM12, LRRC15, CDH6, TMEFF2, TMEM238, GPNMB, ALPPL2, UPK1B, UPK2, LAMP-1, LY6K, EphB2, STEAP, ENPP3, CDH3, Nectin4, LYPD3, EFNA4, GPA33, SLITRK6 or HAVCR1.

[0142] In some embodiments, a first binding domain, or a first and second binding domain, can specifically bind a tumor antigen, wherein the tumor antigen is selected from the group consisting of HER2, EGFR, CMET, HER3, MUC1, MUC16, EPCAM, MSLN, CA6, NAPI2B, TROP2, CEA, CLDN18.2, EGFRvIII, FAP, EphA2, RON, LY6E, FRA, PSMA, DLL3, PTK7, LIV1, ROR1, MAGE-A3, NY-ESO-1, and a fragment thereof. A first binding domain, or a first and second binding domain, can specifically bind a tumor antigen, wherein the tumor antigen is selected from the group consisting of HER2, EGFR, CMET, HER3, MUC1, MUC16, EPCAM, MSLN, CA6, NAPI2B, TROP2, CEA, CLDN18.2, EGFRvIII, FAP, EphA2, RON, LY6E, FRA, PSMA, DLL3, PTK7, LIV1, ROR1, MAGE-A3, NY-ESO-1, LRRC15, GLP-3, CLDN6, CLDN16, UPK1B, VTCN1 (B7-H4) and STRA6 and a fragment thereof.

[0143] In certain embodiments, a first or a first and second antigen binding domain can specifically bind to an antigen associated with fibrotic or inflammatory disease, such as those selected from Cadherin 11, PDPN, LRRC15, Integrin α4β7, Integrin α2β1, MADCAM, Nephrin, Podocin, IFNAR1, BDCA2, CD30, c-KIT, FAP, CD73, CD38, PDGFRβ, Integrin αvβ1, Integrin αvβ3, Integrin αvβ8, GARP, Endosialin, CTGF, Integrin αvβ6, CD40, PD-1, TIM-3, TNFR2, DEC205, DCIR, CD86, CD45RB, CD45RO, MHC Class II, CD25, LRRC15, MMP14, GPX8, and F2RL2,

[0144] An antibody construct of a conjugate can comprise a first binding domain, or a first and second binding domain, that specifically binds a tumor antigen. A conjugate or antibody construct can comprise a first binding domain, or a first and second binding domain, comprising one or more CDRs. A first binding domain, or a first and second binding domain, can comprise at least 80% sequence identity (or at least 90%, 95%, or 100% sequence identity) to any protein sequence in TABLE 1. A first binding domain, or a first and second binding domain, can comprise at set of six CDRs selected from the sets of CDRs set forth in TABLE 1.

TABLE 1
Tumor Antibody CDRs

| | | SEQ | Sequence |
|---|---|---|---|
| | | ID | |
| Antibody | Region | NO: | |
| Pertuzumab | HCDR1 | 13 | GFTFTDYT |
| | HCDR2 | 14 | VNPNSGGS |
| | HCDR3 | 15 | ARNLGPSFYFDY |
| | LCDR1 | 18 | QDVSIG |
| | LCDR2 | 19 | SAS |
| | LCDR3 | 20 | QQYYIYPYT |
| Cetuximab | HCDR1 | 23 | GFSLTNYG |
| | HCDR2 | 24 | IWSGGNT |
| | HCDR3 | 25 | ARALTYYDYEFAY |
| | LCDR1 | 28 | QSIGTN |
| | LCDR2 | 29 | YAS |
| | LCDR3 | 30 | QQNNNWPTT |
| Panitumumab | HCDR1 | 33 | GGSVSSGDYY |
| | HCDR2 | 34 | IYYSGNT |
| | HCDR3 | 35 | VRDRVTGAFDI |
| | LCDR1 | 38 | QDISNY |
| | LCDR2 | 39 | DAS |
| | LCDR3 | 40 | QHFDHLPLA |
| Nimotuzumab | HCDR1 | 43 | GYTFTNYY |
| | HCDR2 | 44 | INPTSGGS |
| | HCDR3 | 45 | ARQGLWFDSDGRGFDF |
| | LCDR1 | 48 | QNIVHSNGNTY |
| | LCDR2 | 49 | KVS |
| | LCDR3 | 50 | FQYSHVPWT |
| Zalutumumab | HCDR1 | 53 | GFTFSTYG |
| | HCDR2 | 54 | IWDDGSYK |
| | HCDR3 | 55 | ARDGITMVRGVMKDYFDY |
| | LCDR1 | 58 | QDISSA |
| | LCDR2 | 59 | DAS |
| | LCDR3 | 60 | QQFNSYPLT |
| Onartuzumab | HCDR1 | 63 | GYTFTSYW |
| | HCDR2 | 64 | IDPSNSDT |
| | HCDR3 | 65 | ATYRSYVTPLDY |
| | LCDR1 | 68 | QSLLYTSSQKNY |
| | LCDR2 | 69 | WAS |
| | LCDR3 | 70 | QQYYAYPWT |
| Patritumab | HCDR1 | 73 | GGSFSGYY |
| | HCDR2 | 74 | INHSGST |
| | HCDR3 | 75 | ARDKWTWYFDL |
| | LCDR1 | 78 | QSVLYSSSNRNY |
| | LCDR2 | 79 | WAS |
| | LCDR3 | 80 | QQYYSTPRT |
| Clivatuzumab | HCDR1 | 83 | GYTFPSYV |
| | HCDR2 | 84 | INPYNDGT |
| | HCDR3 | 85 | ARGFGGSYGFAY |
| | LCDR1 | 88 | SSVSSSY |
| | LCDR2 | 89 | STS |
| | LCDR3 | 90 | HQWNRYPYT |
| Sofituzumab | HCDR1 | 93 | GYSITNDYA |
| | HCDR2 | 94 | ISYSGYT |
| | HCDR3 | 95 | ARWTSGLDY |
| | LCDR1 | 98 | DLIHNW |
| | LCDR2 | 99 | GAT |
| | LCDR3 | 100 | QQYWTTPFT |
| Edrecolomab | HCDR1 | 103 | GYAFTNYL |
| | HCDR2 | 104 | INPGSGGT |
| | HCDR3 | 105 | ARDGPWFAY |
| | LCDR1 | 108 | ENVVTY |
| | LCDR2 | 109 | GAS |
| | LCDR3 | 110 | GQGYSYPYT |
| Adecatumumab | HCDR1 | 113 | GFTFSSYG |
| | HCDR2 | 114 | ISYDGSNK |
| | HCDR3 | 115 | AKDMGWGSGWRPYYYYGMDV |
| | LCDR1 | 118 | QSISSY |
| | LCDR2 | 119 | WAS |
| | LCDR3 | 120 | QQSYDIPYT |
| Anetumab | HCDR1 | 123 | GYSFTSYW |
| | HCDR2 | 124 | IDPGDSRT |
| | HCDR3 | 125 | ARGQLYGGTYMDG |
| | LCDR1 | 128 | SSDIGGYNS |
| | LCDR2 | 129 | GVN |
| | LCDR3 | 130 | SSYDIESATPV |
| huDS6 | HCDR1 | 133 | GYTFTSYN |
| | HCDR2 | 134 | IYPGNGAT |
| | HCDR3 | 135 | ARGDSVPFAY |
| | LCDR1 | 138 | SSVSF |
| | LCDR2 | 139 | STS |
| | LCDR3 | 140 | QQRSSFPLT |
| Lifastuzumab | HCDR1 | 143 | GFSFSDFA |
| | HCDR2 | 144 | IGRVAFHT |
| | HCDR3 | 145 | ARHRGFDVGHFDF |
| | LCDR1 | 148 | ETLVHSSGNTY |
| | LCDR2 | 149 | RVS |
| | LCDR3 | 150 | FQGSFNPLT |
| Sacituzumab | HCDR1 | 153 | GYTFTNYG |
| | HCDR2 | 154 | INTYTGEP |
| | HCDR3 | 155 | ARGGFGSSYWYFDV |
| | LCDR1 | 158 | QDVSIA |
| | LCDR2 | 159 | SAS |
| | LCDR3 | 160 | QQHYITPLT |
| PR1A3 | HCDR1 | 163 | GYTFTEFG |
| | HCDR2 | 164 | INTKTGEA |
| | HCDR3 | 165 | ARWDFYDYVEAMDY |
| | LCDR1 | 168 | QNVGTN |
| | LCDR2 | 169 | SAS |
| | LCDR3 | 170 | HQYYTYPLFT |
| Humanized | HCDR1 | 173 | GYTFTEFG |
| PR1A3 | HCDR2 | 174 | INTKTGEA |
| | HCDR3 | 175 | ARWDFAYYVEAMDY |
| | LCDR1 | 178 | AAVGTY |
| | LCDR2 | 179 | SAS |
| | LCDR3 | 180 | HQYYTYPLFT |
| Humanized Ab2-3 | HCDR1 | 183 | GFVFSSYD |
| | HCDR2 | 184 | YISSGGGIT |
| | HCDR3 | 185 | AAHYFGSSGPFAY |
| | LCDR1 | 188 | ENIFSY |
| | LCDR2 | 189 | NTR |
| | LCDR3 | 190 | QHHYGTPFT |
| IMAB362, | HCDR1 | 193 | GYTFTSYW |
| CLAUDIXIMAB | HCDR2 | 194 | IYPSDSYT |
| | HCDR3 | 195 | TRSWRGNSFDY |
| | LCDR1 | 198 | QSLLNSGNQKNY |
| | LCDR2 | 199 | WAS |
| | LCDR3 | 200 | QNDYSYPFT |
| AMG595 | HCDR1 | 203 | GFTFRNYG |
| | HCDR2 | 204 | IWYDGSDK |
| | HCDR3 | 205 | ARDGYDILTGNPRDFDY |
| | LCDR1 | 208 | QSLVHSDGNTY |
| | LCDR2 | 209 | RIS |
| | LCDR3 | 210 | MQSTHVPRT |
| ABT806 | HCDR1 | 213 | GYSISRDFA |
| | HCDR2 | 214 | ISYNGNT |
| | HCDR3 | 215 | VTASRGFPY |
| | LCDR1 | 218 | QDINSN |
| | LCDR2 | 219 | HGT |
| | LCDR3 | 220 | VQYAQFPWT |
| Sibrotuzumab | HCDR1 | 223 | RYTFTEYT |
| | HCDR2 | 224 | INPNNGIP |
| | HCDR3 | 225 | ARRRIAYGYDEGHAMDY |
| | LCDR1 | 228 | QSLLYSRNQKNY |
| | LCDR2 | 229 | WAS |
| | LCDR3 | 230 | QQYFSYPLT |
| DS-8895a variant | HCDR1 | 233 | GYTFIDYS |
| 1 | HCDR2 | 234 | INTYTGEP |
| | HCDR3 | 235 | ATYYRYERDFDY |
| | LCDR1 | 238 | QSIVHSSGITY |
| | LCDR2 | 239 | KVS |
| | LCDR3 | 240 | FQGSHVPYT |
| DS-8895a variant | HCDR1 | 243 | GYTFIDYS |
| 2 | HCDR2 | 244 | INTYTGEP |
| | HCDR3 | 245 | ATYYRYERDFDY |
| | LCDR1 | 248 | QSIVHSSGITY |
| | LCDR2 | 249 | KVS |
| | LCDR3 | 250 | FQGSHVPYT |
| MEDI-547 | HCDR1 | 253 | GFTFSHYM |
| | HCDR2 | 254 | IGPSGGPT |
| | HCDR3 | 255 | AGYDSGYDYVAVAGPAEYFQH |
| | LCDR1 | 258 | QSISTW |
| | LCDR2 | 259 | KAS |
| | LCDR3 | 260 | QQYNSYSRT |
| Namatumab | HCDR1 | 263 | GFTFSSYL |
| | HCDR2 | 264 | IKQDGSEK |
| | HCDR3 | 265 | TRDGYSSGRHYGMDV |
| | LCDR1 | 268 | QSVSRY |
| | LCDR2 | 269 | DAS |
| | LCDR3 | 270 | QQRSNWPRT |
| RG7841 | HCDR1 | 273 | GFSLTGYS |
| | HCDR2 | 274 | IWGDGST |
| | HCDR3 | 275 | ARDYYFNYASWFAY |
| | LCDR1 | 278 | QGISNYL |
| | LCDR2 | 279 | YTS |
| | LCDR3 | 280 | QQYSELPWT |
| Farletuzumab | HCDR1 | 283 | GFTFSGYG |
| | HCDR2 | 284 | ISSGGSYT |
| | HCDR3 | 285 | ARHGDDPAWFAY |
| | LCDR1 | 288 | SSISSNN |
| | LCDR2 | 289 | GTS |
| | LCDR3 | 290 | QQWSSYPYMYT |
| Mirvetuximab | HCDR1 | 293 | GYTFTGYF |
| | HCDR2 | 294 | IHPYDGDT |
| | HCDR3 | 295 | TRYDGSRAMDY |
| | LCDR1 | 298 | QSVSFAGTSL |
| | LCDR2 | 299 | RAS |
| | LCDR3 | 300 | QQSREYPYT |
| J591 variant 1 | HCDR1 | 303 | GYTFTEXT |
| | HCDR2 | 304 | INPNNGGT |
| | HCDR3 | 305 | AAGWNFDY |
| | LCDR1 | 308 | QDVGTA |
| | LCDR2 | 309 | WAS |
| | LCDR3 | 310 | QQYNSYPLT |
| J591 variant 2 | HCDR1 | 313 | GYTFTEYT |
| | HCDR2 | 314 | INPNNGGT |
| | HCDR3 | 315 | AAGWNFDY |
| | LCDR1 | 318 | ENVVTY |
| | LCDR2 | 319 | GAS |
| | LCDR3 | 320 | GQGYSYPYT |
| Rovalpituzumab | HCDR1 | 323 | GYTFTNYG |
| | HCDR2 | 324 | INTYTGEP |
| | HCDR3 | 325 | ARIGDSSPSDY |
| | LCDR1 | 328 | QSVSND |
| | LCDR2 | 329 | YAS |
| | LCDR3 | 330 | QQDYTSPWT |
| PF-06647020 | HCDR1 | 333 | GYTFTDYA |
| | HCDR2 | 334 | ISTYNDYT |
| | HCDR3 | 335 | ARGNSYFYALDY |
| | LCDR1 | 338 | ESVDSYGKSF |
| | LCDR2 | 339 | RAS |
| | LCDR3 | 340 | QQSNEDPWT |
| Antibody to PTK7 | HCDR1 | 343 | GFTFSSYA |
| | HCDR2 | 344 | ISYDGSIK |
| | HCDR3 | 345 | ARTYYFDY |
| | LCDR1 | 348 | QSIGSS |
| | LCDR2 | 349 | YAS |
| | LCDR3 | 350 | HQSSSLPIT |
| Ladiratuzumab of | HCDR1 | 353 | GLTIEDYY |
| SGN-LIV1A | HCDR2 | 354 | IDPENGDT |
| | HCDR3 | 355 | AVHNAHYGTWFAY |
| | LCDR1 | 358 | QSLLHSSGNTY |
| | LCDR2 | 359 | KIS |
| | LCDR3 | 360 | FQGSHVPYT |
| Cirmtuzumab | HCDR1 | 363 | GYAFTAYN |
| | HCDR2 | 364 | FDPYDGGS |
| | HCDR3 | 365 | ARGWYYFDY |
| | LCDR1 | 368 | KSISKY |
| | LCDR2 | 369 | SGS |
| | LCDR3 | 370 | QQHDESPYT |
| Antibody to | HCDR1 | 373 | GFRFRSHG |
| MAGE-A3 | HCDR2 | 374 | SYDGNNK |
| | HCDR3 | 375 | ASPYTSDWQYFQY |
| | LCDR1 | 378 | QNISTT |
| | LCDR2 | 379 | DTS |
| | LCDR3 | 380 | QQSNSWPLT |
| Antibody to NY- | HCDR1 | 383 | GFSFIDYG |
| ESO-1 | HCDR2 | 384 | MNWSGDKK |
| | HCDR3 | 385 | ARGEYSNRFDP |
| | LCDR1 | 388 | QSLVFTDGNTY |
| | LCDR2 | 389 | KVS |
| | LCDR3 | 390 | MQGTHWPPI |
| Trastuzumab | HCDR1 | 393 | GFNIKDTY |
| | HCDR2 | 394 | IYPTNGYT |
| | HCDR3 | 395 | SRWGGDGFYAMDY |
| | LCDR1 | 398 | QDVNTA |
| | LCDR2 | 399 | SAS |
| | LCDR3 | 400 | QQHYTTPPT |

[0145] A conjugate can comprise a first binding domain that binds a tumor antigen, wherein the first binding domain comprises at least 80% sequence identity to: a) HCDR1 comprising an amino acid sequence of SEQ ID NO: 13, HCDR2 comprising an amino acid sequence of SEQ ID NO: 14, HCDR3 comprising an amino acid sequence of SEQ ID NO: 15, LCDR1 comprising an amino acid sequence of SEQ ID NO: 18, LCDR2 comprising an amino acid sequence of SEQ ID NO: 19, and LCDR3 comprising an amino acid sequence of SEQ ID NO: 20; b) HCDR1 comprising an amino acid sequence of SEQ ID NO: 23, HCDR2 comprising an amino acid sequence of SEQ ID NO: 24, HCDR3 comprising an amino acid sequence of SEQ ID NO: 25, LCDR1 comprising an amino acid sequence of SEQ ID NO: 28, LCDR2 comprising an amino acid sequence of SEQ ID NO: 29, and LCDR3 comprising an amino acid sequence of SEQ ID NO: 30; c) HCDR1 comprising an amino acid sequence of SEQ ID NO: 33, HCDR2 comprising an amino acid sequence of SEQ ID NO: 34, HCDR3 comprising an amino acid sequence of SEQ ID NO: 35, LCDR1 comprising an amino acid sequence of SEQ ID NO: 38, LCDR2 comprising an amino acid sequence of SEQ ID NO: 39, and LCDR3 comprising an amino acid sequence of SEQ ID NO: 40; d) HCDR1 comprising an amino acid sequence of SEQ ID NO: 43, HCDR2 comprising an amino acid sequence of SEQ ID NO: 44, HCDR3 comprising an amino acid sequence of SEQ ID NO: 45, LCDR1 comprising an amino acid sequence of SEQ ID NO: 48, LCDR2 comprising an amino acid sequence of SEQ ID NO: 49, and LCDR3 comprising an amino acid sequence of SEQ ID NO: 50; e) HCDR1 comprising an amino acid sequence of SEQ ID NO: 53, HCDR2 comprising an amino acid sequence of SEQ ID NO: 54, HCDR3 comprising an amino acid sequence of SEQ ID NO: 55, LCDR1 comprising an amino acid sequence of SEQ ID NO: 58, LCDR2 comprising an amino acid sequence of SEQ ID NO: 59, and LCDR3 comprising an amino acid sequence of SEQ ID NO: 60; f) HCDR1 comprising an amino acid sequence of SEQ ID NO: 63, HCDR2 comprising an amino acid sequence of SEQ ID NO: 64, HCDR3 comprising an amino acid sequence of SEQ ID NO: 65, LCDR1 comprising an amino acid sequence of SEQ ID NO: 68, LCDR2 comprising an amino acid sequence of SEQ ID NO: 69, and LCDR3 comprising an amino acid sequence of SEQ ID NO: 70; g) HCDR1 comprising an amino acid sequence of SEQ ID NO: 73, HCDR2 comprising an amino acid sequence of SEQ ID NO: 74, HCDR3 comprising an amino acid sequence of SEQ ID NO: 75, LCDR1 comprising an amino acid sequence of SEQ ID NO: 78, LCDR2 comprising an amino acid sequence of SEQ ID NO: 79, and LCDR3 comprising an amino acid sequence of SEQ ID NO: 80; h) HCDR1 comprising an amino acid sequence of SEQ ID NO: 83, HCDR2 comprising an amino acid sequence of SEQ ID NO: 84, HCDR3 comprising an amino acid sequence of SEQ ID NO: 85, LCDR1 comprising an amino acid sequence of SEQ ID NO: 88, LCDR2 comprising an amino acid sequence of SEQ ID NO: 89, and LCDR3 comprising an amino acid sequence of SEQ ID NO: 90; i) HCDR1 comprising an amino acid sequence of SEQ ID NO: 93, HCDR2 comprising an amino acid sequence of SEQ ID NO: 94, HCDR3 comprising an amino acid sequence of SEQ ID NO: 95, LCDR1 comprising an amino acid sequence of SEQ ID NO: 98, LCDR2 comprising an amino acid sequence of SEQ ID NO: 99, and LCDR3 comprising an amino acid sequence of SEQ ID NO: 100; j) HCDR1 comprising an amino acid sequence of SEQ ID NO: 103, HCDR2 comprising an amino acid sequence of SEQ ID NO: 104, HCDR3 comprising an amino acid sequence of SEQ ID NO: 105, LCDR1 comprising an amino acid sequence of SEQ ID NO: 108, LCDR2 comprising an amino acid sequence of SEQ ID NO: 109, and LCDR3 comprising an amino acid sequence of SEQ ID NO: 110; k) HCDR1 comprising an amino acid sequence of SEQ ID NO: 113, HCDR2 comprising an amino acid sequence of SEQ ID NO: 114, HCDR3 comprising an amino acid sequence of SEQ ID NO: 115, LCDR1 comprising an amino acid sequence of SEQ ID NO: 118, LCDR2 comprising an amino acid sequence of SEQ ID NO: 119, and LCDR3 comprising an amino acid sequence of SEQ ID NO: 120; l) HCDR1 comprising an amino acid sequence of SEQ ID NO: 123, HCDR2 comprising an amino acid sequence of SEQ ID NO: 124, HCDR3 comprising an amino acid sequence of SEQ ID NO: 125, LCDR1 comprising an amino acid sequence of SEQ ID NO: 128, LCDR2 comprising an amino acid sequence of SEQ ID NO: 129, and LCDR3 comprising an amino acid sequence of SEQ ID NO: 130; m) HCDR1 comprising an amino acid sequence of SEQ ID NO: 133, HCDR2 comprising an amino acid sequence of SEQ ID NO: 134, HCDR3 comprising an amino acid sequence of SEQ ID NO: 135, LCDR1 comprising an amino acid sequence of SEQ ID NO: 138, LCDR2 comprising an amino acid sequence of SEQ ID NO: 139, and LCDR3 comprising an amino acid sequence of SEQ ID NO: 140; n) HCDR1 comprising an amino acid sequence of SEQ ID NO: 143, HCDR2 comprising an amino acid sequence of SEQ ID NO: 144, HCDR3 comprising an amino acid sequence of SEQ ID NO: 145, LCDR1 comprising an amino acid sequence of SEQ ID NO: 148, LCDR2 comprising an amino acid sequence of SEQ ID NO: 149, and LCDR3 comprising an amino acid sequence of SEQ ID NO: 150; o) HCDR1 comprising an amino acid sequence of SEQ ID NO: 153, HCDR2 comprising an amino acid sequence of SEQ ID NO: 154, HCDR3 comprising an amino acid sequence of SEQ ID NO: 155, LCDR1 comprising an amino acid sequence of SEQ ID NO: 158, LCDR2 comprising an amino acid sequence of SEQ ID NO: 159, and LCDR3 comprising an amino acid sequence of SEQ ID NO: 160; p) HCDR1 comprising an amino acid sequence of SEQ ID NO: 163, HCDR2 comprising an amino acid sequence of SEQ ID NO: 164, HCDR3 comprising an amino acid sequence of SEQ ID NO: 165, LCDR1 comprising an amino acid sequence of SEQ ID NO: 168, LCDR2 comprising an amino acid sequence of SEQ ID NO: 169, and LCDR3 comprising an amino acid sequence of SEQ ID NO: 170; q) HCDR1 comprising an amino acid sequence of SEQ ID NO: 173, HCDR2 comprising an amino acid sequence of SEQ ID NO: 174, HCDR3 comprising an amino acid sequence of SEQ ID NO: 175, LCDR1 comprising an amino acid sequence of SEQ ID NO: 178, LCDR2 comprising an amino acid sequence of SEQ ID NO: 179, and LCDR3 comprising an amino acid sequence of SEQ ID NO: 180; r) HCDR1 comprising an amino acid sequence of SEQ ID NO: 183, HCDR2 comprising an amino acid sequence of SEQ ID NO: 184, HCDR3 comprising an amino acid sequence of SEQ ID NO: 185, LCDR1 comprising an amino acid sequence of SEQ ID NO: 188, LCDR2 comprising an amino acid sequence of SEQ ID NO: 189, and LCDR3 comprising an amino acid sequence of SEQ ID NO: 190; s) HCDR1 comprising an amino acid sequence of SEQ ID NO: 193, HCDR2 comprising an amino acid sequence of SEQ ID NO: 194, HCDR3 comprising an amino acid sequence of SEQ ID NO: 195, LCDR1 comprising an amino acid sequence of SEQ ID NO: 198, LCDR2 comprising an amino acid sequence of SEQ ID NO: 199, and LCDR3 comprising an amino acid sequence of SEQ ID NO: 200; t) HCDR1 comprising an amino acid sequence of SEQ ID NO: 203, HCDR2 comprising an amino acid sequence of SEQ ID NO: 204, HCDR3 comprising an amino acid sequence of SEQ ID NO: 205, LCDR1 comprising an amino acid sequence of SEQ ID NO: 208, LCDR2 comprising an amino acid sequence of SEQ ID NO: 209, and LCDR3 comprising an amino acid sequence of SEQ ID NO: 210; u) HCDR1 comprising an amino acid sequence of SEQ ID NO: 213, HCDR2 comprising an amino acid sequence of SEQ ID NO: 214, HCDR3 comprising an amino acid sequence of SEQ ID NO: 215, LCDR1 comprising an amino acid sequence of SEQ ID NO: 218, LCDR2 comprising an amino acid sequence of SEQ ID NO: 219, and LCDR3 comprising an amino acid sequence of SEQ ID NO: 220; v) HCDR1 comprising an amino acid sequence of SEQ ID NO: 223, HCDR2 comprising an amino acid sequence of SEQ ID NO: 224, HCDR3 comprising an amino acid sequence of SEQ ID NO: 225, LCDR1 comprising an amino acid sequence of SEQ ID NO: 228, LCDR2 comprising an amino acid sequence of SEQ ID NO: 229, and LCDR3 comprising an amino acid sequence of SEQ ID NO: 230; w) HCDR1 comprising an amino acid sequence of SEQ ID NO: 233, HCDR2 comprising an amino acid sequence of SEQ ID NO: 234, HCDR3 comprising an amino acid sequence of SEQ ID NO: 235, LCDR1 comprising an amino acid sequence of SEQ ID NO: 238, LCDR2 comprising an amino acid sequence of SEQ ID NO: 239, and LCDR3 comprising an amino acid sequence of SEQ ID NO: 240; x) HCDR1 comprising an amino acid sequence of SEQ ID NO: 243, HCDR2 comprising an amino acid sequence of SEQ ID NO: 244, HCDR3 comprising an amino acid sequence of SEQ ID NO: 245, LCDR1 comprising an amino acid sequence of SEQ ID NO: 248, LCDR2 comprising an amino acid sequence of SEQ ID NO: 249, and LCDR3 comprising an amino acid sequence of SEQ ID NO: 250; y) HCDR1 comprising an amino acid sequence of SEQ ID NO: 253, HCDR2 comprising an amino acid sequence of SEQ ID NO: 254, HCDR3 comprising an amino acid sequence of SEQ ID NO: 255, LCDR1 comprising an amino acid sequence of SEQ ID NO: 258, LCDR2 comprising an amino acid sequence of SEQ ID NO: 259, and LCDR3 comprising an amino acid sequence of SEQ ID NO: 260; z) HCDR1 comprising an amino acid sequence of SEQ ID NO: 263, HCDR2 comprising an amino acid sequence of SEQ ID NO: 264, HCDR3 comprising an amino acid sequence of SEQ ID NO: 265, LCDR1 comprising an amino acid sequence of SEQ ID NO: 268, LCDR2 comprising an amino acid sequence of SEQ ID NO: 269, and LCDR3 comprising an amino acid sequence of SEQ ID NO: 270; aa) HCDR1 comprising an amino acid sequence of SEQ ID NO: 273, HCDR2 comprising an amino acid sequence of SEQ ID NO: 274, HCDR3 comprising an amino acid sequence of SEQ ID NO: 275, LCDR1 comprising an amino acid sequence of SEQ ID NO: 278, LCDR2 comprising an amino acid sequence of SEQ ID NO: 279, and LCDR3 comprising an amino acid sequence of SEQ ID NO: 280; bb) HCDR1 comprising an amino acid sequence of SEQ ID NO: 283, HCDR2 comprising an amino acid sequence of SEQ ID NO: 284, HCDR3 comprising an amino acid sequence of SEQ ID NO: 285, LCDR1 comprising an amino acid sequence of SEQ ID NO: 288, LCDR2 comprising an amino acid sequence of SEQ ID NO: 289, and LCDR3 comprising an amino acid sequence of SEQ ID NO: 290; cc) HCDR1 comprising an amino acid sequence of SEQ ID NO: 293, HCDR2 comprising an amino acid sequence of SEQ ID NO: 294, HCDR3 comprising an amino acid sequence of SEQ ID NO: 295, LCDR1 comprising an amino acid sequence of SEQ ID NO: 298, LCDR2 comprising an amino acid sequence of SEQ ID NO: 299, and LCDR3 comprising an amino acid sequence of SEQ ID NO: 300; dd) HCDR1 comprising an amino acid sequence of SEQ ID NO: 303, HCDR2 comprising an amino acid sequence of SEQ ID NO: 304, HCDR3 comprising an amino acid sequence of SEQ ID NO: 305, LCDR1 comprising an amino acid sequence of SEQ ID NO: 308, LCDR2 comprising an amino acid sequence of SEQ ID NO: 309, and LCDR3 comprising an amino acid sequence of SEQ ID NO: 310; ee) HCDR1 comprising an amino acid sequence of SEQ ID NO: 313, HCDR2 comprising an amino acid sequence of SEQ ID NO: 314, HCDR3 comprising an amino acid sequence of SEQ ID NO: 315, LCDR1 comprising an amino acid sequence of SEQ ID NO: 318, LCDR2 comprising an amino acid sequence of SEQ ID NO: 319, and LCDR3 comprising an amino acid sequence of SEQ ID NO: 320; ff) HCDR1 comprising an amino acid sequence of SEQ ID NO: 323, HCDR2 comprising an amino acid sequence of SEQ ID NO: 324, HCDR3 comprising an amino acid sequence of SEQ ID NO: 325, LCDR1 comprising an amino acid sequence of SEQ ID NO: 328, LCDR2 comprising an amino acid sequence of SEQ ID NO: 329, and LCDR3 comprising an amino acid sequence of SEQ ID NO: 330; gg) HCDR1 comprising an amino acid sequence of SEQ ID NO: 333, HCDR2 comprising an amino acid sequence of SEQ ID NO: 334, HCDR3 comprising an amino acid sequence of SEQ ID NO: 335, LCDR1 comprising an amino acid sequence of SEQ ID NO: 338, LCDR2 comprising an amino acid sequence of SEQ ID NO: 339, and LCDR3 comprising an amino acid sequence of SEQ ID NO: 340; hh) HCDR1 comprising an amino acid sequence of SEQ ID NO: 343, HCDR2 comprising an amino acid sequence of SEQ ID NO: 344, HCDR3 comprising an amino acid sequence of SEQ ID NO: 345, LCDR1 comprising an amino acid sequence of SEQ ID NO: 348, LCDR2 comprising an amino acid sequence of SEQ ID NO: 349, and LCDR3 comprising an amino acid sequence of SEQ ID NO: 350; ii) HCDR1 comprising an amino acid sequence of SEQ ID NO: 353, HCDR2 comprising an amino acid sequence of SEQ ID NO: 354, HCDR3 comprising an amino acid sequence of SEQ ID NO: 355, LCDR1 comprising an amino acid sequence of SEQ ID NO: 358, LCDR2 comprising an amino acid sequence of SEQ ID NO: 359, and LCDR3 comprising an amino acid sequence of SEQ ID NO: 360; jj) HCDR1 comprising an amino acid sequence of SEQ ID NO: 363, HCDR2 comprising an amino acid sequence of SEQ ID NO: 364, HCDR3 comprising an amino acid sequence of SEQ ID NO: 365, LCDR1 comprising an amino acid sequence of SEQ ID NO: 368, LCDR2 comprising an amino acid sequence of SEQ ID NO: 369, and LCDR3 comprising an amino acid sequence of SEQ ID NO: 370; kk) HCDR1 comprising an amino acid sequence of SEQ ID NO: 373, HCDR2 comprising an amino acid sequence of SEQ ID NO: 374, HCDR3 comprising an amino acid sequence of SEQ ID NO: 375, LCDR1 comprising an amino acid sequence of SEQ ID NO: 378, LCDR2 comprising an amino acid sequence of SEQ ID NO: 379, and LCDR3 comprising an amino acid sequence of SEQ ID NO: 380; ll) HCDR1 comprising an amino acid sequence of SEQ ID NO: 383, HCDR2 comprising an amino acid sequence of SEQ ID NO: 384, HCDR3 comprising an amino acid sequence of SEQ ID NO: 385, LCDR1 comprising an amino acid sequence of SEQ ID NO: 388, LCDR2 comprising an amino acid sequence of SEQ ID NO: 389, and LCDR3 comprising an amino acid sequence of SEQ ID NO: 390; or mm) HCDR1 comprising an amino acid sequence of SEQ ID NO: 393, HCDR2 comprising an amino acid sequence of SEQ ID NO: 394, HCDR3 comprising an amino acid sequence of SEQ ID NO: 395, LCDR1 comprising an amino acid sequence of SEQ ID NO: 398, LCDR2 comprising an amino acid sequence of SEQ ID NO: 399, and LCDR3 comprising an amino acid sequence of SEQ ID NO: 400.

[0146] An antibody construct of a conjugate can comprise a first binding domain, or a first and second binding domain, that specifically binds a tumor antigen, each binding domain comprising one or more variable regions. For example, a binding domain can comprise a light chain variable domain (VL domain). A binding domain can comprise a VL sequence set forth in TABLE 2. A binding domain can comprise a sequence having at least 80% sequence identity (or at least 90%, 95%, or 100% sequence identity) to a VL sequence in TABLE 2. A binding domain can comprise a heavy chain variable domain (VH domain). A binding domain can comprise VH sequence in TABLE 2. A binding domain can comprising a sequence having at least 80% sequence identity (or at least 90%, 95%, or 100% sequence identity) to any VH sequence in Table 4. A binding domain can comprise a pair of VL and VH sequences set forth in TABLE 2.

TABLE 2
Tumor Antibody V_{H} sequences and V_{L} sequences

| Antibody | Region | SEQ ID NO: | Sequence |
|---|---|---|---|
| Pertuzumab | V_{H} | 12 | EVQLVESGGGLVQPGGSLRLSCAASGFTFTDYTMDWV |
| | | | RQAPGKGLEWVADVNPNSGGSIYNQRFKGRFTLSVDRS |
| | | | KNTLYLQMNSLRAEDTAVYYCARNLGPSFYFDYWGQG |
| | | | TLVTVSS |
| | V_{L} | 17 | DIQMTQSPSSLSASVGDRVTITCKASQDVSIGVAWYQQ |
| | | | KPGKAPKLLIYSASYRYTGVPSRFSGSGSGTDFTLTISSL |
| | | | QPEDFATYYCQQYYIYPYTFGQGTKVEIK |
| Cetuximab | V_{H} | 22 | QVQLKQSGPGLVQPSQSLSITCTVSGFSLTNYGVHWVR |
| (EGFR) | | | QSPGKGLEWLGVIWSGGNTDYNTPFTSRLSINKDNSKS |
| | | | QVFFKMNSLQSNDTAIYYCARALTYYDYEFAYWGQGT |
| | | | LVTVSA |
| | V_{L} | 27 | DILLTQSPVILSVSPGERVSFSCRASQSIGTNIHWYQQRT |
| | | | NGSPRLLIKYASESISGIPSRFSGSGSGTDFTLSINSVESED |
| | | | IADYYCQQNNNWPTTFGAGTKLELK |
| Panitumumab | V_{H} | 32 | QVQLQESGPGLVKPSETLSLTCTVSGGSVSSGDYYWTW |
| (EGFR) | | | IRQSPGKGLEWIGHIYYSGNTNYNPSLKSRLTISIDTSKT |
| | | | QFSLKLSSVTAADTAIYYCVRDRVTGAFDIWGQGTMVT |
| | | | VSS |
| | V_{L} | 37 | DIQMTQSPSSLSASVGDRVTITCQASQDISNYLNWYQQK |
| | | | PGKAPKLLIYDASNLETGVPSRFSGSGSGTDFTFTISSLQP |
| | | | EDIATYFCQHFDHLPLAFGGGTKVEIK |
| Nimotuzumab | V_{H} | 42 | QVQLQQSGAEVKKPGSSVKVSCKASGYTFTNYYIYWV |
| (EGFR) | | | RQAPGQGLEWIGGINPTSGGSNFNEKFKTRVTITVDEST |
| | | | NTAYMELSSLRSEDTAFYFCARQGLWFDSDGRGFDFW |
| | | | GQGSTVTVSS |
| | V_{L} | 47 | DIQMTQSPSSLSASVGDRVTITCRSSQNIVHSNGNTYLD |
| | | | WYQQTPGKAPKLLIYKVSNRFSGVPSRFSGSGSGTDFTF |
| | | | TISSLQPEDIATYYCFQYSHVPWTFGQGTKLEIK |
| Zalutumumab | V_{H} | 52 | QVQLVESGGGVVQPGRSLRLSCAASGFTFSTYGMHWV |
| (EGFR) | | | RQAPGKGLEWVAVIWDDGSYKYYGDSVKGRFTISRDN |
| | | | SKNTLYLQMNSLRAEDTAVYYCARDGITMVRGVMKD |
| | | | YFDYWGQGTLVTVSS |
| | V_{L} | 57 | AIQLTQSPSSLSASVGDRVTITCRASQDISSALVWYQQKP |
| | | | GKAPKLLIYDASSLESGVPSRFSGSESGTDFTLTISSLQPE |
| | | | DFATYYCQQFNSYPLTFGGGTKVEIK |
| Onartuzumab | V_{H} | 62 | EVQLVESGGGLVQPGGSLRLSCAASGYTFTSYWLHWV |
| | | | RQAPGKGLEWVGMIDPSNSDTRFNPNFKDRFTISADTSK |
| | | | NTAYLQMNSLRAEDTAVYYCATYRSYVTPLDYWGQGT |
| | | | LVTVSS |
| | V_{L} | 67 | DIQMTQSPSSLSASVGDRVTITCKSSQSLLYTSSQKNYLA |
| | | | WYQQKPGKAPKLLIYWASTRESGVPSRFSGSGSGTDFT |
| | | | LTISSLQPEDFATYYCQQYYAYPWTFGQGTKVEIK |
| Patritumab | V_{H} | 72 | QVQLQQWGAGLLKPSETLSLTCAVYGGSFSGYYWSWI |
| | | | RQPPGKGLEWIGEINHSGSTNYNPSLKSRVTISVETSKNQ |
| | | | FSLKLSSVTAADTAVYYCARDKWTWYFDLWGRGTLVT |
| | | | VSS |
| | V_{L} | 77 | DIEMTQSPDSLAVSLGERATINCRSSQSVLYSSSNRNYL |
| | | | AWYQQNPGQPPKLLIYWASTRESGVPDRFSGSGSGTDF |
| | | | TLTISSLQAEDVAVYYCQQYYSTPRTFGQGTKVEIK |
| Clivatuzumab | V_{H} | 82 | QVQLQQSGAEVKKFGASVKVSCEASGYTFPSYVLHWV |
| | | | KQAPGQGLEWIGYINPYNDGTQTNKKFKGKATLTRDTS |
| | | | INTAYMELSRLRSDDTAVYYCARGFGGSYGFAYNGQG |
| | | | TLVTVSS |
| | V_{L} | 87 | DIQLTQSPSSLSASVGDRVTMTCSASSSVSSSYLYWYQQ |
| | | | KPGKAPKLWIYSTSNLASGVPARFSGSGSGTDFTLTISSL |
| | | | QPEDSASYFCHQWNRYPYTFGGGTRLEIK |
| Sofituzumab | V_{H} | 92 | EVQLVESGGGLVQPGGSLRLSCAASGYSITNDYAWNW |
| (MUC16) | | | VRQAPGKGLEWVGYISYSGYTTYNPSLKSRFTISRDTSK |
| | | | NTLYLQMNSLRAEDTAVYYCARWTSGLDYWGQGTLV |
| | | | TVSS |
| | V_{L} | 97 | DIQMTQSPSSLSASVGDRVTITCKASDLIHNWLAWYQQ |
| | | | KPGKAPKLLIYGATSLETGVPSRFSGSGSGTDFTLTISSL |
| | | | QPEDFATYYCQQYWTTPFTFGQGTKVEIK |
| Edrecolomab | V_{H} | 102 | QVQLQQSGAELVRPGTSVKVSCKASGYAFTNYLIEWVK |
| | | | QRPGQGLEWIGVINPGSGGTNYNEKFKGKATLTADKSS |
| | | | STAYMQLSSLTSDDSAVYFCARDGPWFAYWGQGTLVT |
| | | | VSA |
| | V_{L} | 107 | NIVMTQSPKSMSMSVGERVTLTCKASENVVTYVSWYQ |
| | | | QKPEQSPKLLIYGASNRYTGVPDRFTGSGSATDFTLTISS |
| | | | VQAEDLADYHCGQGYSYPYTFGGGTKLEIK |
| Adecatumumab | V_{H} | 112 | EVQLLESGGGVVQPGRSLRLSCAASGFTFSSYGMHWVR |
| | | | QAPGKGLEWVAVISYDGSNKYYADSVKGRFTISRDNSK |
| | | | NTLYLQMNSLRAEDTAVYYCAKDMGWGSGWRPYYYY |
| | | | GMDVWGQGTTVTVSS |
| | V_{L} | 117 | ELQMTQSPSSLSASVGDRVTITCRTSQSISSYLNWYQQK |
| | | | PGQPPKLLIYWASTRESGVPDRFSGSGSGTDFTLTISSLQ |
| | | | PEDSATYYCQQSYDIPYTFGQGTKLEIK |
| Anetumab | V_{H} | 122 | QVELVQSGAEVKKPGESLKISCKGSGYSFTSYWIGWVR |
| (MSLN) | | | QAPGKGLEWMGIIDPGDSRTRYSPSFQGQVTISADKSIST |
| | | | AYLQWSSLKASDTAMYYCARGQLYGGTYMDGWGQG |
| | | | TLVTVSS |
| | V_{L} | 127 | DIALTQPASVSGSPGQSITISCTGTSSDIGGYNSVSWYQQ |
| | | | HPGKAPKLMIYGVNNRPSGVSNRFSGSKSGNTASLTISG |
| | | | LQAEDEADYYCSSYDIESATPVFGGGTKLTVL |
| huDS6 | V_{H} | 132 | QAQLVQSGAEVVKPGASVKMSCKASGYTFTSYNMHW |
| | | | VKQTPGQGLEWIGYIYPGNGATNYNQKFQGKATLTADP |
| | | | SSSTAYMQISSLTSEDSAVYFCARGDSVPFAYWGQGTL |
| | | | VTVSA |
| | V_{L} | 137 | EIVLTQSPATMSASPGERVTITCSAHSSVSFMHWFQQKP |
| | | | GTSPKLWIYSTSSLASGVPARFGGSGSGTSYSLTISSMEA |
| | | | EDAATYYCQQRSSFPLTFGAGTKLELK |
| Lifastuzumab | V_{H} | 142 | EVQLVESGGGLVQPGGSLRLSCAASGFSFSDFAMSWVR |
| | | | QAPGKGLEWVATIGRVAFHTYYPDSMKGRFTISRDNSK |
| | | | NTLYLQMNSLRAEDTAVYYCARHRGFDVGHFDFWGQ |
| | | | GTLVTVSS |
| | V_{L} | 147 | DIQMTQSPSSLSASVGDRVTITCRSSETLVHSSGNTYLE |
| | | | WYQQKPGKAPKLLIYRVSNRFSGVPSRFSGSGSGTDFTL |
| | | | TISSLQPEDFATYYCFQGSFNPLTFGQGTKVEIK |
| Sacituzumab | V_{H} | 152 | QVQLQQSGSELKKPGASVKVSCKASGYTFTNYGMNWV |
| (TROP2) | | | KQAPGQGLKWMGWINTYTGEPTYTDDFKGRFAFSLDT |
| | | | SVSTAYLQISSLKADDTAVYFCARGGFGSSYWYFDVWG |
| | | | QGSLVTVSS |
| | V_{L} | 157 | DIQLTQSPSSLSASVGDRVSITCKASQDVSIAVAWYQQK |
| | | | PGKAPKLLIYSASYRYTGVPDRFSGSGSGTDFTLTISSLQ |
| | | | PEDFAVYYCQQHYITPLTFGAGTKVEIK |
| PR1A3 | V_{H} | 162 | QVKLQQSGPELKKPGETVKISCKASGYTFTEFGMNWVK |
| (CEA) | | | QAPGKGLKWMGWINTKTGEATYVEEFKGRFAFSLETS |
| | | | ATTAYLQINNLKNEDTAKYFCARWDFYDYVEAMDYW |
| | | | GQGTTVTVSS |
| | V_{L} | 167 | DIVMTQSQRFMSTSVGDRVSVTCKASQNVGTNVAWYQ |
| | | | QKPGQSPKALIYSASYRYSGVPDRFTGSGSGTDFTLTISN |
| | | | VQSEDLAEYFCHQYYTYPLFTFGSGTKLEMK |
| Humanized | V_{H} | 172 | QVQLVQSGAEVKKPGASVKVSCKASGYTFTEFGMNWV |
| PR1A3 | | | RQAPGQGLEWMGWINTKTGEATYVEEFKGRVTFTTDT |
| (CEA) | | | STSTAYMELRSLRSDDTAVYYCARWDFAYYVEAMDY |
| | | | WGQGTTVTVSS |
| | V_{L} | 177 | DIQMTQSPSSLSASVGDRVTITCKASAAVGTYVAWYQQ |
| | | | KPGKAPKLLIYSASYRKRGVPSRFSGSGSGTDFTLTISSL |
| | | | QPEDFATYYCHQYYTYPLFTFGQGTKLEIK |
| Humanized Ab2-3 | V_{H} | 182 | EVQLQESGPGLVKPGGSLSLSCAASGFVFSSYDMSWVR |
| | | | QTPERGLEWVAYISSGGGITYAPSTVKGRFTVSRDNAK |
| | | | NTLYLQMNSLTSEDTAVYYCAAHYFGSSGPFAYWGQG |
| | | | TLVTVSS |
| | V_{L} | 187 | DIQMTQSPASLSASVGDRVTITCRASENIFSYLAWYQQK |
| | | | PGKSPKLLVYNTRTLAEGVPSRFSGSGSGTDFSLTISSLQ |
| | | | PEDFATYYCQHHYGTPFTFGSGTKLEIK |
| IMAB362, | V_{H} | 192 | QVQLQQPGAELVRPGASVKLSCKASGYTFTSYWINWV |
| CLAUDIXIMAB | | | KQRPGQGLEWIGNIYPSDSYTNYNQKFKDKATLTVDKS |
| (CLDN18.2) | | | SSTAYMQLSSPTSEDSAVYYCTRSWRGNSFDYWGQGTT |
| | | | LTVSS |
| | V_{L} | 197 | DIVMTQSPSSLTVTAGEKVTMSCKSSQSLLNSGNQKNY |
| | | | LTWYQQKPGQPPKLLIYWASTRESGVPDRFTGSGSGTD |
| | | | FTLTISSVQAEDLAVYYCQNDYSYPFTFGSGTKLEIK |
| AMG595 | V_{H} | 202 | QVQLVESGGGVVQSGRSLRLSCAASGFTFRNYGMHWV |
| (EGFRvIII) | | | RQAPGKGLEWVAVIWYDGSDKYYADSVRGRFTISRDN |
| | | | SKNTLYLQMNSLRAEDTAVYYCARDGYDILTGNPRDFD |
| | | | YWGQGTLVTVSS |
| | V_{L} | 207 | DTVMTQTPLSSHVTLGQPASISCRSSQSLVHSDGNTYLS |
| | | | WLQQRPGQPPRLLIYRISRRFSGVPDRFSGSGAGTDFTLE |
| | | | ISRVEAEDVGVYYCMQSTHVPRTFGQGTKVEIK |
| ABT806 | V_{H} | 212 | EVQLQESGPGLVKPSQTLSLTCTVSGYSISRDFAWNWIR |
| | | | QPPGKGLEWMGYISYNGNTRYQPSLKSRITISRDTSKNQ |
| | | | FFLKLNSVTAADTATYYCVTASRGFPYWGQGTLVTVSS |
| | V_{L} | 217 | DIQMTQSPSSMSVSVGDRVTITCHSSQDINSNIGWLQQK |
| | | | PGKSFKGLIYHGTNLDDGVPSRFSGSGSGTDYTLTISSLQ |
| | | | PEDFATYYCVQYAQFPWTFGGGTKLEIK |
| Sibrotuzuma(FAP) | V_{H} | 222 | QVQLVQSGAEVKKPGASVKVSCKTSRYTFTEYTIHWVR |
| | | | QAPGQRLEWIGGINPNNGIPNYNQKFKGRVTITVDTSAS |
| | | | TAYMELSSLRSEDTAVYYCARRRIAYGYDEGHAMDYW |
| | | | GQGTLVTVSS |
| | V_{L} | 227 | DIVMTQSPDSLAVSLGERATINCKSSQSLLYSRNQKNYL |
| | | | AWYQQKPGQPPKLLIFWASTRESGVPDRFSGSGFGTDFT |
| | | | LTISSLQAEDVAVYYCQQYFSYPLTFGQGTKVEIK |
| DS-8895a variant | V_{H} | 232 | QVQLVQSGAEVKKPGASVKVSCKASGYTFIDYSMHWV |
| 1 | | | RQAPGQGLEWMGWINTYTGEPTYSDDFKGRVTITADTS |
| | | | TSTAYLELSSLRSEDTAVYYCATYYRYERDFDYWGQGT |
| | | | LVTVSS |
| | V_{L} | 237 | DIVMTQSPLSLPVTPGEPASISCRSSQSIVHSSGITYLEWY |
| | | | LQKPGQSPQLLIYKVSNRFSGVPDRFSGSGSGTDFTLKIS |
| | | | RVEAEDVGVYYCFQGSHVPYTFGQGTKVEIK |
| DS-8895a variant | V_{H} | 242 | QIQLVQSGAEVKKPGASVKVSCKASGYTFIDYSMHWVR |
| 2 | | | QAPGQGLKWMGWINTYTGEPTYSDDFKGRFAFSLDTST |
| | | | STAYLELSSLRSEDTAVYYCATYYRYERDFDYWGQGTL |
| | | | VTVSS |
| | V_{L} | 247 | DVLMTQSPLSLPVTPGEPASISCRSSQSIVHSSGITYLEW |
| | | | YLQKPGQSPQLLIYKVSNRFSGVPDRFSGSGSGTDFTLKI |
| | | | SRVEAEDVGVYYCFQGSHVPYTFGQGTKVEIK |
| MEDI-547 | V_{H} | 252 | EVQLLESGGGLVQPGGSLRLSCAASGFTFSHYMMAWV |
| | | | RQAPGKGLEWVSRIGPSGGPTHYADSVKGRFTISRDNSK |
| | | | NTLYLQMNSLRAEDTAVYYCAGYDSGYDYVAVAGPA |
| | | | EYFQHWGQGTLVTVSS |
| | V_{L} | 257 | DIQMTQSPSSLSASVGDRVTITCRASQSISTWLAWYQQK |
| | | | PGKAPKLLIYKASNLHTGVPSRFSGSGSGTEFSLTISGLQ |
| | | | PDDFATYYCQQYNSYSRTFGQGTKVEIK |
| Narnatumab | V_{H} | 262 | EVQLVESGGGLVQPGGSLRLSCAASGFTFSSYLMTWVR |
| | | | QAPGKGLEWVANIKQDGSEKYYVDSVKGRFTISRDNA |
| | | | KNSLNLQMNSLRAEDTAVYYCTRDGYSSGRHYGMDV |
| | | | WGQGTTVIVSS |
| | V_{L} | 267 | EIVLTQSPATLSLSPGERATLSCRASQSVSRYLAWYQQK |
| | | | PGQAPRLLIYDASNRATGIPARFSGSGSGTDFTLTISSLEP |
| | | | EDFAVYYCQQRSNWPRTFGQGTKVEIK |
| RG7841 | V_{H} | 272 | EVQLVESGPALVKPTQTLTLTCTVSGFSLTGYSVNWIRQ |
| | | | PPGKALEWLGMIWGDGSTDYNSALKSRLTISKDTSKNQ |
| | | | VVLTMTNMDPVDTATYYCARDYYFNYASWFAYWGQG |
| | | | TLVTVSS |
| | V_{L} | 277 | DIQMTQSPSSLSASVGDRVTITCSASQGISNYLNWYQQK |
| | | | PGKTVKLLIYYTSNLHSGVPSRFSGSGSGTDYTLTISSLQ |
| | | | PEDFATYYCQQYSELPWTFGQGTKVEIK |
| Farletuzumab | V_{H} | 282 | EVQLVESGGGVVQPGRSLRLSCSASGFTFSGYGLSWVR |
| | | | QAPGKGLEWVAMISSGGSYTYYADSVKGRFAISRDNAK |
| | | | NTLFLQMDSLRPEDTGVYFCARHGDDPAWFAYWGQGT |
| | | | PVTVSS |
| | V_{L} | 287 | DIQLTQSPSSLSASVGDRVTITCSVSSSISSNNLHWYQQK |
| | | | PGKAPKPWIYGTSNLASGVPSRFSGSGSGTDYTFTISSLQ |
| | | | PEDIATYYCQQWSSYPYMYTFGQGTKVEIK |
| Mirvetuximab | V_{H} | 292 | QVQLVQSGAEVVKPGASVKISCKASGYTFTGYFMNWV |
| | | | KQSPGQSLEWIGRIHPYDGDTFYNQKFQGKATLTVDKS |
| | | | SNTAHMELLSLTSEDFAVYYCTRYDGSRAMDYWGQGT |
| | | | TVTVSS |
| | V_{L} | 297 | DIVLTQSPLSLAVSLGQPAIISCKASQSVSFAGTSLMHWY |
| | | | HQKPGQQPRLLIYRASNLEAGVPDRFSGSGSKTDFTLTIS |
| | | | PVEAEDAATYYCQQSREYPYTFGGGTKLEIK |
| J591 variant 1 | V_{H} | 302 | EVQLQQSGPELKKPGTSVRISCKTSGYTFTEYTIHWVKQ |
| | | | SHGKSLEWIGNINPNNGGTTYNQKFEDKATLTVDKSSST |
| | | | AYMELRSLTSEDSAVYYCAAGWNFDYWGQGTTLTVSS |
| | V_{L} | 307 | DIVMTQSHKFMSTSVGDRVSIICKASQDVGTAVDWYQQ |
| | | | KPGQSPKLLIYWASTRHTGVPDRFTGSGSGTDFTLTITN |
| | | | VQSEDLADYFCQQYNSYPLTFGAGTMLDLK |
| J591 variant 2 | V_{H} | 312 | EVQLQQSGPELVKPGTSVRISCKTSGYTFTEYTIHWVKQ |
| | | | SHGKSLEWIGNINPNNGGTTYNQKFEDKATLTVDKSSST |
| | | | AYMELRSLTSEDSAVYYCAAGWNFDYWGQGTTLTVSS |
| | V_{L} | 317 | NIVMTQSPKSMSMSVGERVTLTCKASENVVTYVSWYQ |
| | | | QKPEQSPKLLIYGASNRYTGVPDRFTGSGSATDFTLTISS |
| | | | VQAEDLADYHCGQGYSYPYTFGGGTKLEIK |
| Rovalpituzumab | V_{H} | 322 | QVQLVQSGAEVKKPGASVKVSCKASGYTFTNYGMNW |
| | | | VRQAPGQGLEWMGWINTYTGEPTYADDFKGRVTMTT |
| | | | DTSTSTAYMELRSLRSDDTAVYYCARIGDSSPSDYWGQ |
| | | | GTLVTVSS |
| | V_{L} | 327 | EIVMTQSPATLSVSPGERATLSCKASQSVSNDVVWYQQ |
| | | | KPGQAPRLLIYYASNRYTGIPARFSGSGSGTEFTLTISSLQ |
| | | | SEDFAVYYCQQDYTSPWTFGQGTKLEIK |
| PF-06647020 | V_{H} | 332 | QVQLVQSGPEVKKPGASVKVSCKASGYTFTDYAVHWV |
| | | | RQAPGKRLEWIGVISTYNDYTYNNQDFKGRVTMTRDTS |
| | | | ASTAYMELSRLRSEDTAVYYCARGNSYFYALDYWGQG |
| | | | TSVTVSS |
| | V_{L} | 337 | EIVLTQSPATLSLSPGERATLSCRASESVDSYGKSFMHW |
| | | | YQQKPGQAPRLLIYRASNLESGIPARFSGSGSGTDFTLTI |
| | | | SSLEPEDFAVYYCQQSNEDPWTFGGGTKLEIK |
| Antibody to PTK7 | V_{H} | 342 | QVQLVESGGGVVQPGRSLRLSCAASGFTFSSYAFHWVR |
| | | | QAPGKGLEWVAVISYDGSIKYYADSVKGRFTISRDNSK |
| | | | NTLYLQMNSLRAEDTAVYYCARTYYFDYWGQGTLVT |
| | | | VSS |
| | V_{L} | 347 | EIVLTQSPDFQSVTPKEKVTITCRASQSIGSSLHWYQQKP |
| | | | DQSPKLLIKYASQSFSGVPSRFSGSGSGTDFTLTINSLEAE |
| | | | DAAAYYCHQSSSLPITFGQGTRLEIK |
| Ladiratuzumab of | V_{H} | 352 | QVQLVQSGAEVKKPGASVKVSCKASGLTIEDYYMHWV |
| SGN-LIV1A | | | RQAPGQGLEWMGWIDPENGDTEYGPKFQGRVTMTRDT |
| | | | SINTAYMELSRLRSDDTAVYYCAVHNAHYGTWFAYWG |
| | | | QGTLVTVSS |
| | V_{L} | 357 | DVVMTQSPLSLPVTLGQPASISCRSSQSLLHSSGNTYLEY |
| | | | FQQRPGQSPRPLIYKISTRFSGVPDRFSGSGSGTDFTLKIS |
| | | | RVEAEDVGVYYCFQGSHVPYTFGGGTKVEIK |
| Cirmtuzumab | V_{H} | 362 | QVQLQESGPGLVKPSQTLSLTCTVSGYAFTAYNIHWVR |
| | | | QAPGQGLEWMGSFDPYDGGSSYNQKFKDRLTISKDTSK |
| | | | NQVVLTMTNMDPVDTATYYCARGWYYFDYWGHGTL |
| | | | VTVSS |
| | V_{L} | 367 | DIVMTQTPLSLPVTPGEPASISCRASKSISKYLAWYQQKP |
| | | | GQAPRLLIYSGSTLQSGIPPRFSGSGYGTDFTLTINNIESE |
| | | | DAAYYFCQQHDESPYTFGEGTKVEIK |
| Antibody to | V_{H} | 372 | QVQLVESGGGVVQPGRSLRLSCTASGFRFRSHGMHWV |
| MAGE-A3 | | | RQAPGKGLEWVAVISYDGNNKLYADSVKGRITISRDNS |
| | | | KNTLFLQMNNVRAEDTAVYYCASPYTSDWQYFQYWG |
| | | | QGTLVIVSS |
| | V_{L} | 377 | EIVMTQSPATLSVSPGERATFSCRASQNISTTLAWYQQK |
| | | | PGQAPRLLIYDTSTRATGIPARFSGSGSGTEFTLTISSLQS |
| | | | EDLAVYYCQQSNSWPLTFGGGTKVEIK |
| Antibody to NY- | V_{H} | 382 | QVQLVQSGGGVVRPGGSLRLSCAASGFSFIDYGMSWVR |
| ESO-1 | | | QVPGKGLEWVAGMNWSGDKKGHAESVKGRFIISRDNA |
| | | | KNTLYLEMSSLRVEDTALYFCARGEYSNRFDPRGRGTL |
| | | | VTVSS |
| | V_{L} | 387 | DIVMTQTPLSLPVTLGQPASLSCRSSQSLVFTDGNTYLN |
| | | | WFQQRPGQSPRRLIYKVSSRDPGVPDRFSGTGSGTDFTL |
| | | | EISRVEAEDIGVYYCMQGTHWPPIFGQGTKVEIK |
| Trastuzumab | V_{H} | 392 | EVQLVESGGGLVQPGGSLRLSCAASGFNIKDTYIHWVR |
| | | | QAPGKGLEWVARIYPTNGYTRYADSVKGRFTISADTSK |
| | | | NTAYLQMNSLRAEDTAVYYCSRWGGDGFYAMDYWG |
| | | | QGTLVTVSS |
| | V_{L} | 397 | DIQMTQSPSSLSASVGDRVTITCRASQDVNTAVAWYQQ |
| | | | KPGKAPKLLIYSASFLYSGVPSRFSGSRSGTDFTLTISSLQ |
| | | | PEDFATYYCQQHYTTPPTFGQGTKVEIK |
| 4H11 | V_{H} | 494 | EVKLQESGGGFVKPGGSLKVSCAASGFTFSSYAMSWVR |
| (MUC16) | | | LSPEMRLEWVATISSAGGYIFYSDSVQGRFTISRDNAKN |
| | | | TLHLQMGSLRSGDTAMYYCARQGFGNYGDYYAMDY |
| | | | WGQGTTVTVSS |
| | V_{L} | 495 | DIELTQSPSSLAVSAGEKVTMSCKSSQSLLNSRTRKNQL |
| | | | AWYQQKPGQSPELLIYWASTRQSGVPDRFTGSGSGTDF |
| | | | TLTISSVQAEDLAVYYCQQSYNLLTFGPGTKLEVK |
| 4A5 | V_{H} | 496 | EVKLEESGGGFVKPGGSLKISCAASGFTFRNYAMSWVR |
| (MUC16) | | | LSPEMRLEWVATISSAGGYIFYSDSVQGRFTISRDNAKN |
| | | | TLHLQMGSLRSGDTAMYYCARQGFGNYGDYYAMDY |
| | | | WGQGTTVTVSS |
| | V_{L} | 497 | DIELTQSPSSLAVSAGEKVTMSCKSSQSLLNSRTRKNQL |
| | | | AWYQQKTGQSPELLIYWASTRQSGVPDRFTGSGSGTDF |
| | | | TLTISSVQAEDLAVYYCQQSYNLLTFGPGTKLEIK |
| Arcitumomab | V_{H} | 498 | EVKLVESGGGLVQPGGSLRLSCATSGFTFTDYYMNWV |
| (CEA) | | | RQPPGKALEWLGFIGNKANGYTTEYSASVKGRFTISRD |
| | | | KSQSILYLQMNTLRAEDSATYYCTRDRGLRFYFDYWGQ |
| | | | GTTLTVSS |
| | V_{L} | 499 | QTVLSQSPAILSASPGEKVTMTCRASSSVTYIHWYQQKP |
| | | | GSSPKSWIYATSNLASGVPARFSGSGSGTSYSLTISRVEA |
| | | | EDAATYYCQHWSSKPPTFGGGTKLEIK |
| MORab-009 | V_{H} | 500 | QVQLQQSGPELEKPGASVKISCKASGYSFTGYTMNWVK |
| | | | QSHGKSLEWIGLITPYNGASSYNQKFRGKATLTVDKSSS |
| | | | TAYMDLLSLTSEDSAVYFCARGGYDGRGFDYWGSGTP |
| | | | VTVSS |
| | V_{L} | 501 | DIELTQSPAIMSASPGEKVTMTCSASSSVSYMHWYQQK |
| | | | SGTSPKRWIYDTSKLASGVPGRFSGSGSGNSYSLTISSVE |
| | | | AEDDATYYCQQWSKHPLTFGSGTKVEIK |
| RG7787 | V_{H} | 502 | MQVQLVQSGAEVKKPGASVKVSCKASGYSFTGYTMN |
| | | | WVRQAPGQGLEWMGLITPYNGASSYNQKFRGKATMT |
| | | | VDTSTSTVYMELSSLRSEDTAVYYCARGGYDGRGFDY |
| | | | WGQGTLVTVSS |
| | V_{L} | 503 | MDIQMTQSPSSLSASVGDRVTITCSASSSVSYMHWYQQ |
| | | | KSGKAPKLLIYDTSKLASGVPSRFSGSGSGTDFTLTISSL |
| | | | QPEDFATYYCQQWSKHPLTFGQGTKLEIK |
| Atezolizumab | V_{H} | 504 | EVQLVESGGGLVQPGGSLRLSCAASGFTFSDSWIHWVR |
| | | | QAPGKGLEWVAWISPYGGSTYYADSVKGRFTISADTSK |
| | | | NTAYLQMNSLRAEDTAVYYCARRHWPGGFDYWGQGT |
| | | | LVTVSS |
| | V_{L} | 505 | DIQMTQSPSSLSASVGDRVTITCRASQDVSTAVAWYQQ |
| | | | KPGKAPKLLIYSASFLYSGVPSRFSGSGSGTDFTLTISSLQ |
| | | | PEDFATYYCQQYLYHPATFGQGTKVEIK |
| MDX-1105 | V_{H} | 506 | QVQLVQSGAEVKKPGSSVKVSCKTSGDTFSTYAISWVR |
| | | | QAPGQGLEWMGGIIPIFGKAHYAQKFQGRVTITADESTS |
| | | | TAYMELSSLRSEDTAVYFCARKFHFVSGSPFGMDVWG |
| | | | QGTTVTVSS |
| | V_{L} | 507 | EIVLTQSPATLSLSPGERATLSCRASQSVSSYLAWYQQK |
| | | | PGQAPRLLIYDASNRATGIPARFSGSGSGTDFTLTISSLEP |
| | | | EDFAVYYCQQRSNWPTFGQGTKVEIK |
| Antibody to FAP | V_{H} | 508 | QVQLQESGPGLVKPSQTLSLTCAISGDSVSSNSVTWNWI |
| variant 1 | | | RQSPSRGLEWLGRTYYRSKWYNDYAVSVKGRITINPDT |
| | | | SKNQFYLQLKSVTPEDAAVYYCARDSSILYGDYWGQG |
| | | | TLVTVSS |
| | V_{H} | 509 | QVQLQQSGPGLVKPSQTLSLTCAISGDSVSSNSVTWNWI |
| | | | RQSPSRGLEWLGRTYYRSKWYNDYAVSVKGRITINPDT |
| | | | SKNQFYLQLKSVTPEDAAVYYCARDSSILYGDYWGQG |
| | | | TLVTVS |
| | V_{L} | 510 | QAVLTQPSSLSASPGASASLTCTLPSGINVGTYRIFWFQQ |
| | | | KPGSPPQYLLSYKSDSDNHQGSGVPSRFSGSKDASANA |
| | | | GILLISGLQSEDEADYYCMIWHSSAWVFGGGTKLTVL |
| Antibody to FAP | V_{H} | 511 | QVQLVQSGAEVKKPGASVKVSCKTSGYTFTDYYIHWV |
| variant 2 | | | RQAPGQGLEWMGWINPNRGGTNYAQKFQGRVTMTRD |
| | | | TSIATAYMELSRLRSDDTAVYYCATASLKIAAVGTFDC |
| | | | WGQGTLVTVSS |
| | V_{L} | 512 | SYELTQPPSVSVSPGQTARITCSGDALSKQYAFWFQQKP |
| | | | GQAPILVIYQDTKRPSGIPGRFSGSSSGTTVTLTISGAQA |
| | | | DDEADYYCQSADSSGTYVFGTGTKVTVL |
| Antibody to FAP | V_{H} | 513 | EVQLVETGGGVVQPGRSLRLSCAASGFSFSTHGMYWV |
| variant 3 | | | RQPPGKGLEWVAVISYDGSDKKYADSVKGRFTISRDNS |
| | | | KNTVYLEMSSVRAEDTALYYCFCRRDAFDLWGQGTMV |
| | | | TVSS |
| | V_{L} | 514 | SYVLTQPPSVSVSPGQTARITCSGDALPKKYAYWYQQK |
| | | | SGQAPVLVIYEDTKRPSGIPERFSGSSSGTMATLTISGAQ |
| | | | VEDEADYYCYSTDSSGNYWVFGGGTEVTVL |
| Antibody to FAP | V_{H} | 515 | EVQLVESGGGLVEPGGSLRLSCAASGFTFSDAWMNWV |
| variant 4 | | | RQAPGKGLEWVGRIKTKSDGGTTDYAAPVRGRFSISRD |
| | | | DSKNTLFLEMNSLKTEDTAIYYCFITVIVVSSESPLDHW |
| | | | GQGTLVTVSS |
| | V_{L} | 516 | SYELTQPPSVSVSPGQTARITCSGDELPKQYAYWYQQKP |
| | | | GQAPVLVIYKDRQRPSGIPERFSGSSSGTTVTLTISGVQA |
| | | | EDEADYYCQSAYSINTYVIFGGGTKLTVL |
| Antibody to FAP | V_{H} | 517 | EVQLVESGGGLVKPGGSLRLSCAASGFTFSDYYMSWIR |
| variant 5 | | | QAPGKGLEWISYISSGSSYTNYADSVKGRFTISRDNAKK |
| | | | SVYLEVNGLTVEDTAVYYCARVRYGDREMATIGGFDF |
| | | | WGQGTLVTVSS |
| | V_{L} | 518 | SYELTQPPSVSVSPGQTARITCSGDALPKQYAYWYQQSP |
| | | | GQAPVLVIYKDSERPSGIPERFSGSSSGTTVTLTISGVQA |
| | | | EDEADYYCQSADSGGTSRIFGGGTKLTVL |
| Antibody to FAP | V_{H} | 519 | QVQLQESGPGLVRSTETLSLTCLVSGDSINSHYWSWLR |
| variant 6 | | | QSPGRGLEWIGYIYYTGPTNYNPSLKSRVSISLGTSKDQF |
| | | | SLKLSSVTAADTARYYCARNKVFWRGSDFYYYMDVW |
| | | | GKGTTVTVSS |
| | V_{L} | 520 | EIVLTQSPGTLSLSLGERATLSCRASQSLANNYLAWYQQ |
| | | | KPGQAPRLLMYDASTRATGIPDRFSGSGSGTDFTLTISRL |
| | | | EPEDFAVYYCQQFVTSHHMYIFGQGTKVEIK |
| Antibody to FAP | V_{H} | 521 | HVQLQESGPGLVKPSETLSLTCTVSGGSISSNNYYWGWI |
| variant 7 | | | RQTPGKGLEWIGSIYYSGSTNYNPSLKSRVTISVDTSKN |
| | | | QFSLKLSSVTAADTAVYYCARGARWQARPATRIDGVAF |
| | | | DIWGQGTMVTVSS |
| | V_{H} | 522 | QVQLQESGPGLVKPSETLSLTCTVSGGSISSNNYYWGWI |
| | | | RQTPGKGLEWIGSIYYSGSTNYNPSLKSRVTISVDTSKN |
| | | | QFSLKLSSVTAADTAVYYCARGARWQARPATRIDGVAF |
| | | | DIWGQGTMVTVSS |
| | V_{H} | 523 | EVQLVQSGAEVKKPGASVKVSCKASGYTFTSYGISWVR |
| | | | QAPGQGLEWMGWISAYNGNTNYAQKLQGRVTMTTDT |
| | | | STSTAYMELRSLRSDDTAVYYCARDWSRSGYYLPDYW |
| | | | GQGTLVTVSS |
| | V_{L} | 524 | ETTLTQSPGTLSLSPGERATLSCRASQTVTRNYLAWYQQ |
| | | | KPGQAPRLLMYGASNRAAGVPDRFSGSGSGTDFTLTISR |
| | | | LEPEDFAVYYCQQFGSPYTFGQGTKVEIK |
| | V_{L} | 525 | DVVMTQSPLSLPVTLGQPASISCRSSQSLLHSNGYNYLD |
| | | | WYLQRPGQSPHLLIFLGSNRASGVPDRFSGSGSGTDFTL |
| | | | KISRVEAEDVGIYYCMQALQTPPTFGQGTKVEIK |
| Antibody huM25 | V_{H} | 526 | EVQLVQSGAEVKKPGASVKVSCKASGYKFSSYWIEWV |
| to LRRC15 | | | KQAPGQGLEWIGEILPGSDTTNYNEKFKDRATFTSDTSI |
| | | | NTAYMELSRLRSDDTAVYYCARDRGNYRAWFGYWGQ |
| | | | GTLVTVSS |
| | V_{L} | 527 | DIQMTQSPSSLSASVGDRVTITCRASQDISNYLNWYQQK |
| | | | PGGAVKFLIYYTSRLHSGVPSRFSGSGSGTDYTLTISSLQ |
| | | | PEDFATYFCQQGEALPWTFGGGTKVEIK |
| Antibody | V_{H} | 528 | EVQLVQSGAEVKKPGSSVKVSCKASGFTFTDYYIHWVK |
| huAD208.4.1 to | | | QAPGQGLEWIGLVYPYIGGTNYNQKFKGKATLTVDTST |
| LRRC15 | | | TTAYMEMSSLRSEDTAVYYCARGDNKYDAMDYWGQG |
| | | | TTVTVSS |
| | V_{L} | 529 | DIVLTQSPDSLAVSLGERATINCRASQSVSTSSYSYMHW |
| | | | YQQKPGQPPKLLIKYASSLESGVPDRFSGSGSGTDFTLTI |
| | | | SSLQ AEDVAVYYCEQSWEIRTFGGGTKVEIK |
| Antibody | V_{H} | 530 | EVQLVQSGAEVKKPGSSVKVSCKASGYTFTNYWMHW |
| huAD208.12.1 to | | | VKQAPGQGLEWIGMIHPNSGSTKHNEKFRGKATLTVDE |
| LRRC15 | | | STTTAYMELSSLRSEDTAVYYCARSDFGNYRWYFDVW |
| | | | GQGTTVTVSS |
| | V_{L} | 531 | EIVLTQSPATLSLSPGERATLSCRASQSSSNNLHWYQQK |
| | | | PGQAPRVLIKYVSQSISGIPARFSGSGSGTDFTLTISSLEPE |
| | | | DFA VYFCQQSNSWPFTFGQGTKLEIK |
| Antibody | V_{H} | 532 | EVQLVQSGAEVKKPGSSVKVSCKASGFTFTDYYIHWVK |
| huAD208.14.1 to | | | QAPGQGLEWIGLVYPYIGGSSYNQQFKGKATLTVDTST |
| LRRC15 | | | STAYMELSSLRSEDTAVYYCARGDNNYDAMDYWGQG |
| | | | TTVTVSS |
| | V_{L} | 533 | DIVLTQSPDSLAVSLGERATISCRASQSVSTSTYNYMHW |
| | | | YQQKPGQPPKLLVKYASNLESGVPDRFSGSGSGTDFTLT |
| | | | ISSL QAEDVAVYYCHHTWEIRTFGGGTKVEIK |
| Antibody | V_{H} | 534 | EVQLVESGGGLVQPGGSLRLSCAVSGFSLTSYGVHWVR |
| hu139.10 to | | | QATGKGLEWLGVIWAGGSTNYNSALMSRLTISKENAKS |
| LRRC15 | | | SVYLQMNSLRAGDTAMYYCATHMITEDYYGMDYWGQ |
| | | | GTTVTVSS |
| | V_{L} | 535 | DIVMTQSPDSLAVSLGERATINCKSSQSLLNSRTRKNYL |
| | | | AWYQQKPGQSPKLLIYWASTRESGVPDRFSGSGSGTDF |
| | | | TLTISS LQAEDVAVYYCKQSYNLPTFGGGTKVEIK |
| h1D11 Vh1.9 | V_{H} | 536 | EVQLVQSGAEVKKPGASVKVSCKASGVTFTSYWIGWV |
| VAR C2 | | | RQAPGQGLEWIGDIYPGGGYTNYNEKFKGRVTITRDTS |
| (VTCN1) | | | TSTAYLELSSLASEDTAVYYCARLAGSSYRGAMDSWG |
| | | | QGTLVTVSS |
| | V_{L} | 537 | DIQMTQSPSSLSASVGDRVTITCKASQGFNKYVAWYQQ |
| | | | KPGKAPKLLIYYTSTLQPGVPSRFSGSGSGRDYTLTISSL |
| | | | QPEDFATYYCLQYGDLLYAFGQGTKVEIKR |
| BNC101 | V_{H} | 538 | EVQLVQSGAEVKKPGESLRISCKGSGYSFTAYWIEWVR |
| (LRG5) | | | QAPGKGLEWIGEILPGSDSTNYNEKFKGHVTISADKSIST |
| | | | AYLQWSSLKASDTAVYYCARSGYYGSSQYWGQGTLVT |
| | | | VSS |
| | V_{L} | 539 | DIVLTQSPASLAVSPGQRATITCRASESVDSYGNSFMHW |
| | | | YQQKPGQPPKLLIYLTSNLESGVPDRFSGSGSGTDFTLTI |
| | | | NPVEANDAATYYCQQNAEDPRTFGGGTKLEIK |
| T2-6C | V_{H} | 540 | QMQLVESGGGLVQPGRSLRLSCAASGFTFDDYAIHWVR |
| (TMPRSS4) | | | QAPGKGLEWVSGISWNSEIVGYGDSVKGRFTISRDNAK |
| | | | NSLDLQMNSLRAEDTAVYYCARGSSGRAFDIWGQGTM |
| | | | VTVSS |
| | V_{L} | 541 | SGVGSDIQMTQSPSSVSASVGDRITITCRASQSISTYLNW |
| | | | YQQKPGKAPKLLIYGATSLQSGVPSKFSGSGSGTOFTLTI |
| | | | RGLQPDDFGTYYCQQSYNL1PRTFGQGTKLDIKR |
| T2-6G | V_{H} | 542 | QVQLVESGGGVVQPGRSLRLSCVGSFTFSNYGMHWVR |
| (TMPRSS4) | | | QAPGKGLQWVAVXSYDGSLKKYYADSVKGRFTISRDN |
| | | | SKNTLYLQMNSLRSEDTAVYYCARGTTMDVWGQGKG |
| | | | TTVTVSS |
| | V_{L} | 543 | SGVGSQSALTQPPSASGTPGQRVTISCSGSNSNIGSNTVN |
| | | | WYQQFPGKAPQLLIFGHNQRPSGVPDRFSGSKSGTSASL |
| | | | SISGLQSEDEAHYYCASWDDTVSGPKWVFGGGTKVDIK |
| | | | R |
| Labetuzumab | V_{H} | 544 | EVQLVESGGGVVQPGRSLRLSCSSSGFDFTTYWMSWVR |
| (CEACAM5) | | | QAPGKGLEWVAEIHPDSSTINYAPSLKDRFTISRDNSKN |
| | | | TLFLQMDSLRPEDTGVYFCASLYFGFPWFAYWGQGTPV |
| | | | TVSS |
| | V_{L} | 545 | DIQLTQSPSSLSASVGDRVTITCKASQDVGTSVAWYQQ |
| | | | KPGKAPKLLIYWTSTRHTGVPSRFSGSGSGTDFTFTISSL |
| | | | QPEDIATYYCQQYSLYRSFGQGTKVEIK |
| Ab to EPHA2 | V_{H} | 546 | EVQLLESGGGLVQPGGSLRLSCAASGFTFSHYMMAWV |
| | | | RQAPGKGLEWVSRIGPSGGPTHYADSVKGRFTISRDNSK |
| | | | NTLYLQMNSLRAEDTAVYYCAGYDSGYDYVAVAGPA |
| | | | EYFQHWGQGTLVTVSS |
| | V_{L} | 547 | DIQMTQSPSSLSASVGDRVTITCRASQSISTWLAWYQQK |
| | | | PGKAPKLLIYKASNLHTGVPSRFSGSGSGTEFSLTISGLQ |
| | | | PDDFATYYCQQYNSYSRTFGQGTKVEIK |

[0147] An antibody construct can comprise a first binding domain, or a first and second binding domain, that specifically binds a tumor antigen, wherein the first binding domain, or first and second binding domain, comprises: a) a VH sequence having at least 80% sequence identity to an amino acid sequence of SEQ ID NO: 12, and a VL sequence having at least 80% sequence identity to an amino acid sequence of SEQ ID NO: 17; b) a VH sequence having at least 80% sequence identity to an amino acid sequence of SEQ ID NO: 22, and a VL sequence having at least 80% sequence identity to an amino acid sequence of SEQ ID NO: 27; c) a VH sequence having at least 80% sequence identity to an amino acid sequence of SEQ ID NO: 32, and a VL sequence having at least 80% sequence identity to an amino acid sequence of SEQ ID NO: 37; d) a VH sequence having at least 80% sequence identity to an amino acid sequence of SEQ ID NO: 42, and a VL sequence having at least 80% sequence identity to an amino acid sequence of SEQ ID NO: 47; e) a VH sequence having at least 80% sequence identity to an amino acid sequence of SEQ ID NO: 52, and a VL sequence having at least 80% sequence identity to an amino acid sequence of SEQ ID NO: 57; f) a VH sequence having at least 80% sequence identity to an amino acid sequence of SEQ ID NO: 62, and a VL sequence having at least 80% sequence identity to an amino acid sequence of SEQ ID NO: 67; g) a VH sequence having at least 80% sequence identity to an amino acid sequence of SEQ ID NO: 72, and a VL sequence having at least 80% sequence identity to an amino acid sequence of SEQ ID NO: 77; h) a VH sequence having at least 80% sequence identity to an amino acid sequence of SEQ ID NO: 82, and a VL sequence having at least 80% sequence identity to an amino acid sequence of SEQ ID NO: 87; i) a VH sequence having at least 80% sequence identity to an amino acid sequence of SEQ ID NO: 92, and a VL sequence having at least 80% sequence identity to an amino acid sequence of SEQ ID NO: 97; j) a VH sequence having at least 80% sequence identity to an amino acid sequence of SEQ ID NO: 102, and a VL sequence having at least 80% sequence identity to an amino acid sequence of SEQ ID NO: 107; k) a VH sequence having at least 80% sequence identity to an amino acid sequence of SEQ ID NO: 112, and a VL sequence having at least 80% sequence identity to an amino acid sequence of SEQ ID NO: 117; l) a VH sequence having at least 80% sequence identity to an amino acid sequence of SEQ ID NO: 122, and a VL sequence having at least 80% sequence identity to an amino acid sequence of SEQ ID NO: 127; m) a VH sequence having at least 80% sequence identity to an amino acid sequence of SEQ ID NO: 132, and a VL sequence having at least 80% sequence identity to an amino acid sequence of SEQ ID NO: 137; n) a VH sequence having at least 80% sequence identity to an amino acid sequence of SEQ ID NO: 142, and a VL sequence having at least 80% sequence identity to an amino acid sequence of SEQ ID NO: 147; o) a VH sequence having at least 80% sequence identity to an amino acid sequence of SEQ ID NO: 152, and a VL sequence having at least 80% sequence identity to an amino acid sequence of SEQ ID NO: 157; p) a VH sequence having at least 80% sequence identity to an amino acid sequence of SEQ ID NO: 162, and a VL sequence having at least 80% sequence identity to an amino acid sequence of SEQ ID NO: 167; q) a VH sequence having at least 80% sequence identity to an amino acid sequence of SEQ ID NO: 172, and a VL sequence having at least 80% sequence identity to an amino acid sequence of SEQ ID NO: 177; r) a VH sequence having at least 80% sequence identity to an amino acid sequence of SEQ ID NO: 182, and a VL sequence having at least 80% sequence identity to an amino acid sequence of SEQ ID NO: 187; s) a VH sequence having at least 80% sequence identity to an amino acid sequence of SEQ ID NO: 192, and a VL sequence having at least 80% sequence identity to an amino acid sequence of SEQ ID NO: 197; t) a VH sequence having at least 80% sequence identity to an amino acid sequence of SEQ ID NO: 202, and a VL sequence having at least 80% sequence identity to an amino acid sequence of SEQ ID NO: 207; u) a VH sequence having at least 80% sequence identity to an amino acid sequence of SEQ ID NO: 212, and a VL sequence having at least 80% sequence identity to an amino acid sequence of SEQ ID NO: 217; v) a VH sequence having at least 80% sequence identity to an amino acid sequence of SEQ ID NO: 222, and a VL sequence having at least 80% sequence identity to an amino acid sequence of SEQ ID NO: 227; w) a VH sequence having at least 80% sequence identity to an amino acid sequence of SEQ ID NO: 232, and a VL sequence having at least 80% sequence identity to an amino acid sequence of SEQ ID NO: 237; x) a VH sequence having at least 80% sequence identity to an amino acid sequence of SEQ ID NO: 242, and a VL sequence having at least 80% sequence identity to an amino acid sequence of SEQ ID NO: 247; y) a VH sequence having at least 80% sequence identity to an amino acid sequence of SEQ ID NO: 252, and a VL sequence having at least 80% sequence identity to an amino acid sequence of SEQ ID NO: 257; z) a VH sequence having at least 80% sequence identity to an amino acid sequence of SEQ ID NO: 262, and a VL sequence having at least 80% sequence identity to an amino acid sequence of SEQ ID NO: 267; aa) a VH sequence having at least 80% sequence identity to an amino acid sequence of SEQ ID NO: 272, and a VL sequence having at least 80% sequence identity to an amino acid sequence of SEQ ID NO: 277; bb) a VH sequence having at least 80% sequence identity to an amino acid sequence of SEQ ID NO: 282, and a VL sequence having at least 80% sequence identity to an amino acid sequence of SEQ ID NO: 287; cc) a VH sequence having at least 80% sequence identity to an amino acid sequence of SEQ ID NO: 292, and a VL sequence having at least 80% sequence identity to an amino acid sequence of SEQ ID NO: 297; dd) a VH sequence having at least 80% sequence identity to an amino acid sequence of SEQ ID NO: 302, and a VL sequence having at least 80% sequence identity to an amino acid sequence of SEQ ID NO: 307; ee) a VH sequence having at least 80% sequence identity to an amino acid sequence of SEQ ID NO: 312, and a VL sequence having at least 80% sequence identity to an amino acid sequence of SEQ ID NO: 317; ff) a VH sequence having at least 80% sequence identity to an amino acid sequence of SEQ ID NO: 322, and a VL sequence having at least 80% sequence identity to an amino acid sequence of SEQ ID NO: 327; gg) a VH sequence having at least 80% sequence identity to an amino acid sequence of SEQ ID NO: 332, and a VL sequence having at least 80% sequence identity to an amino acid sequence of SEQ ID NO: 337; hh) a VH sequence having at least 80% sequence identity to an amino acid sequence of SEQ ID NO: 342, and a VL sequence having at least 80% sequence identity to an amino acid sequence of SEQ ID NO: 347; ii) a VH sequence having at least 80% sequence identity to an amino acid sequence of SEQ ID NO: 352, and a VL sequence having at least 80% sequence identity to an amino acid sequence of SEQ ID NO: 357; jj) a VH sequence having at least 80% sequence identity to an amino acid sequence of SEQ ID NO: 362, and a VL sequence having at least 80% sequence identity to an amino acid sequence of SEQ ID NO: 367; kk) a VH sequence having at least 80% sequence identity to an amino acid sequence of SEQ ID NO: 372, and a VL sequence having at least 80% sequence identity to an amino acid sequence of SEQ ID NO: 377; ll) a VH sequence having at least 80% sequence identity to an amino acid sequence of SEQ ID NO: 382, and a VL sequence having at least 80% sequence identity to an amino acid sequence of SEQ ID NO: 387; or mm) a VH sequence having at least 80% sequence identity to an amino acid sequence of SEQ ID NO: 392, and a VL sequence having at least 80% sequence identity to an amino acid sequence of SEQ ID NO: 397.

[0148] An antibody construct can comprise a first binding domain, or a first and second binding domain, that specifically binds a tumor antigen, wherein the first binding domain, or first and second binding domain, comprising a) a VH sequence having at least 80% sequence identity to an amino acid sequence of SEQ ID NO: 494, and a VL sequence having at least 80% sequence identity to an amino acid sequence of SEQ ID NO: 495; b) a VH sequence having at least 80% sequence identity to an amino acid sequence of SEQ ID NO: 496, and a VL sequence having at least 80% sequence identity to an amino acid sequence of SEQ ID NO: 497; c) a VH sequence having at least 80% sequence identity to an amino acid sequence of SEQ ID NO: 498, and a VL sequence having at least 80% sequence identity to an amino acid sequence of SEQ ID NO: 499; d) a VH sequence having at least 80% sequence identity to an amino acid sequence of SEQ ID NO: 500, and a VL sequence having at least 80% sequence identity to an amino acid sequence of SEQ ID NO: 501; e) a VH sequence having at least 80% sequence identity to an amino acid sequence of SEQ ID NO: 502, and a VL sequence having at least 80% sequence identity to an amino acid sequence of SEQ ID NO: 503; f) a VH sequence having at least 80% sequence identity to an amino acid sequence of SEQ ID NO: 504, and a VL sequence having at least 80% sequence identity to an amino acid sequence of SEQ ID NO: 505; g) a VH sequence having at least 80% sequence identity to an amino acid sequence of SEQ ID NO: 506, and a VL sequence having at least 80% sequence identity to an amino acid sequence of SEQ ID NO: 507; h) a VH sequence having at least 80% sequence identity to an amino acid sequence of SEQ ID NO: 508, and a VL sequence having at least 80% sequence identity to an amino acid sequence of SEQ ID NO: 510; i) a VH sequence having at least 80% sequence identity to an amino acid sequence of SEQ ID NO: 509, and a VL sequence having at least 80% sequence identity to an amino acid sequence of SEQ ID NO: 510; j) a VH sequence having at least 80% sequence identity to an amino acid sequence of SEQ ID NO: 511, and a VL sequence having at least 80% sequence identity to an amino acid sequence of SEQ ID NO: 512; k) a VH sequence having at least 80% sequence identity to an amino acid sequence of SEQ ID NO: 513, and a VL sequence having at least 80% sequence identity to an amino acid sequence of SEQ ID NO: 514; l) a VH sequence having at least 80% sequence identity to an amino acid sequence of SEQ ID NO: 515, and a VL sequence having at least 80% sequence identity to an amino acid sequence of SEQ ID NO: 516; m) a VH sequence having at least 80% sequence identity to an amino acid sequence of SEQ ID NO: 517, and a VL sequence having at least 80% sequence identity to an amino acid sequence of SEQ ID NO: 518; n) a VH sequence having at least 80% sequence identity to an amino acid sequence of SEQ ID NO: 519, and a VL sequence having at least 80% sequence identity to an amino acid sequence of SEQ ID NO: 520; o) a VH sequence having at least 80% sequence identity to an amino acid sequence of SEQ ID NO: 521, 522, or 523, and a VL sequence having at least 80% sequence identity to an amino acid sequence of SEQ ID NO: 524 or 525; p) a VH sequence having at least 80% sequence identity to an amino acid sequence of SEQ ID NO: 526, and a VL sequence having at least 80% sequence identity to an amino acid sequence of SEQ ID NO: 527; q) a VH sequence having at least 80% sequence identity to an amino acid sequence of SEQ ID NO: 528, and a VL sequence having at least 80% sequence identity to an amino acid sequence of SEQ ID NO: 529; r) a VH sequence having at least 80% sequence identity to an amino acid sequence of SEQ ID NO: 530, and a VL sequence having at least 80% sequence identity to an amino acid sequence of SEQ ID NO: 531; s) a VH sequence having at least 80% sequence identity to an amino acid sequence of SEQ ID NO: 532, and a VL sequence having at least 80% sequence identity to an amino acid sequence of SEQ ID NO: 533; t) a VH sequence having at least 80% sequence identity to an amino acid sequence of SEQ ID NO: 534, and a VL sequence having at least 80% sequence identity to an amino acid sequence of SEQ ID NO: 535; u) a VH sequence having at least 80% sequence identity to an amino acid sequence of SEQ ID NO: 536, and a VL sequence having at least 80% sequence identity to an amino acid sequence of SEQ ID NO: 537; v) a VH sequence having at least 80% sequence identity to an amino acid sequence of SEQ ID NO: 538, and a VL sequence having at least 80% sequence identity to an amino acid sequence of SEQ ID NO: 539; w) a VH sequence having at least 80% sequence identity to an amino acid sequence of SEQ ID NO: 540, and a VL sequence having at least 80% sequence identity to an amino acid sequence of SEQ ID NO: 541; x) a VH sequence having at least 80% sequence identity to an amino acid sequence of SEQ ID NO: 542, and a VL sequence having at least 80% sequence identity to an amino acid sequence of SEQ ID NO: 543; y) a VH sequence having at least 80% sequence identity to an amino acid sequence of SEQ ID NO: 544, and a VL sequence having at least 80% sequence identity to an amino acid sequence of SEQ ID NO: 545; or z) a VH sequence having at least 80% sequence identity to an amino acid sequence of SEQ ID NO: 546, and a VL sequence having at least 80% sequence identity to an amino acid sequence of SEQ ID NO: 547.

[0149] An antibody construct of a conjugate can comprise a first binding domain, a second binding domain and an Fc domain, wherein the first and second binding domains and the Fc domain comprise an antibody. The first binding domain and the second binding domain can bind to a tumor antigen. Such an antibody construct can comprise an antibody light chain. An antibody construct can comprise a light chain comprising a light chain sequence in TABLE 3. An antibody construct can comprise a light chain comprising a sequence having at least 80% sequence identity to a light chain sequence in TABLE 3. An antibody construct can comprise an antibody heavy chain. An antibody construct can comprise a heavy chain comprising a heavy chain sequence in TABLE 3. An antibody construct can comprise a heavy chain comprising a sequence having at least 80% sequence identity (or at least 90%, 95%, or 100% sequence identity) to any heavy chain sequence in Table 3. An antibody construct can comprise a pair of heavy and light chains having sequences having at least 80% sequence identity (or at least 90%, 95%, or 100% sequence identity) to any pair of sequences in TABLE 3. An antibody construct can comprise a pair of heavy and light chains having sequences set forth in TABLE 3.

TABLE 3
Tumor Antibody Heavy Chain and Light Chain sequences

| Antibody | Region | SEQ ID NO: | Sequence |
|---|---|---|---|
| Pertuzumab | Heavy | 11 | EVQLVESGGGLVQPGGSLRLSCAASGFTFTDYTMDWV |
| | Chain | | RQAPGKGLEWVADVNPNSGGSIYNQRFKGRFTLSVDRS |
| | | | KNTLYLQMNSLRAEDTAVYYCARNLGPSFYFDYWGQG |
| | | | TLVTVSSASTKGPSVFPLAPSSKSTSGGTAALGCLVKDY |
| | | | FPEPVTVSWNSGALTSGVHTFPAVLQSSGLYSLSSVVTV |
| | | | PSSSLGTQTYICNVNHKPSNTKVDKKVEPKSCDKTHTCP |
| | | | PCPAPELLGGPSVFLFPPKPKDTLMISRTPEVTCVVVDVS |
| | | | HEDPEVKFNWYVDGVEVHNAKTKPREEQYNSTYRVVS |
| | | | VLTVLHQDWLNGKEYKCKVSNKALPAPIEKTISKAKGQ |
| | | | PREPQVYTLPPSREEMTKNQVSLTCLVKGFYPSDIAVEW |
| | | | ESNGQPENNYKTTPPVLDSDGSFFLYSKLTVDKSRWQQ |
| | | | GNVFSCSVMHEALHNHYTQKSLSLSPGK |
| | Light | 16 | DIQMTQSPSSLSASVGDRVTITCKASQDVSIGVAWYQQ |
| | Chain | | KPGKAPKLLIYSASYRYTGVPSRFSGSGSGTDFTLTISSL |
| | | | QPEDFATYYCQQYYIYPYTFGQGTKVEIKRTVAAPSVFI |
| | | | FPPSDEQLKSGTASVVCLLNNFYPREAKVQWKVDNALQ |
| | | | SGNSQESVTEQDSKDSTYSLSSTLTLSKADYEKHKVYA |
| | | | CEVTHQGLSSPVTKSFNRGEC |
| Cetuximab | Heavy | 21 | QVQLKQSGPGLVQPSQSLSITCTVSGFSLTNYGVHWVR |
| | Chain | | QSPGKGLEWLGVIWSGGNTDYNTPFTSRLSINKDNSKS |
| | | | QVFFKMNSLQSNDTAIYYCARALTYYDYEFAYWGQGT |
| | | | LVTVSAASTKGPSVFPLAPSSKSTSGGTAALGCLVKDYF |
| | | | PEPVTVSWNSGALTSGVHTFPAVLQSSGLYSLSSVVTVP |
| | | | SSSLGTQTYICNVNHKPSNTKVDKKVEPKSCDKTHTCPP |
| | | | CPAPELLGGPSVFLFPPKPKDTLMISRTPEVTCVVVDVS |
| | | | HEDPEVKFNWYVDGVEVHNAKTKPREEQYNSTYRVVS |
| | | | VLTVLHQDWLNGKEYKCKVSNKALPAPIEKTISKAKGQ |
| | | | PREPQVYTLPPSRDELTKNQVSLTCLVKGFYPSDIAVEW |
| | | | ESNGQPENNYKTTPPVLDSDGSFFLYSKLTVDKSRWQQ |
| | | | GNVFSCSVMHEALHNHYTQKSLSLSPGK |
| | Light | 26 | DILLTQSPVILSVSPGERVSFSCRASQSIGTNIHWYQQRT |
| | Chain | | NGSPRLLIKYASESISGIPSRFSGSGSGTDFTLSINSVESED |
| | | | IADYYCQQNNNWPTTFGAGTKLELKRTVAAPSVFIFPPS |
| | | | DEQLKSGTASVVCLLNNFYPREAKVQWKVDNALQSGN |
| | | | SQESVTEQDSKDSTYSLSSTLTLSKADYEKHKVYACEVT |
| | | | HQGLSSPVTKSFNRGEC |
| Panitumumab | Heavy | 31 | QVQLQESGPGLVKPSETLSLTCTVSGGSVSSGDYYWTW |
| | Chain | | IRQSPGKGLEWIGHIYYSGNTNYNPSLKSRLTISIDTSKT |
| | | | QFSLKLSSVTAADTAIYYCVRDRVTGAFDIWGQGTMVT |
| | | | VSSASTKGPSVFPLAPCSRSTSESTAALGCLVKDYFPEPV |
| | | | TVSWNSGALTSGVHTFPAVLQSSGLYSLSSVVTVPSSNF |
| | | | GTQTYTCNVDHKPSNTKVDKTVERKCCVECPPCPAPPV |
| | | | AGPSVFLFPPKPKDTLMISRTPEVTCVVVDVSHEDPEVQ |
| | | | FNWYVDGVEVHNAKTKPREEQFNSTFRVVSVLTVVHQ |
| | | | DWLNGKEYKCKVSNKGLPAPIEKTISKTKGQPREPQVY |
| | | | TLPPSREEMTKNQVSLTCLVKGFYPSDIAVEWESNGQPE |
| | | | NNYKTTPPMLDSDGSFFLYSKLTVDKSRWQQGNVFSCS |
| | | | VMHEALHNHYTQKSLSLSPGK |
| | Light | 36 | DIQMTQSPSSLSASVGDRVTITCQASQDISNYLNWYQQK |
| | Chain | | PGKAPKLLIYDASNLETGVPSRFSGSGSGTDFTFTISSLQP |
| | | | EDIATYFCQHFDHLPLAFGGGTKVEIKRTVAAPSVFIFPP |
| | | | SDEQLKSGTASVVCLLNNFYPREAKVQWKVDNALQSG |
| | | | NSQESVTEQDSKDSTYSLSSTLTLSKADYEKHKVYACE |
| | | | VTHQGLSSPVTKSFNRGEC |
| Nimotuzumab | Heavy | 41 | QVQLQQSGAEVKKPGSSVKVSCKASGYTFTNYYIYWV |
| | Chain | | RQAPGQGLEWIGGINPTSGGSNFNEKFKTRVTITVDEST |
| | | | NTAYMELSSLRSEDTAFYFCARQGLWFDSDGRGFDFW |
| | | | GQGSTVTVSSASTKGPSVFPLAPSSKSTSGGTAALGCLV |
| | | | KDYFPEPVTVSWNSGALTSGVHTFPAVLQSSGLYSLSSV |
| | | | VTVPSSSLGTQTYICNVNHKPSNTKVDKKVEPKSCDKT |
| | | | HTCPPCPAPELLGGPSVFLFPPKPKDTLMISRTPEVTCVV |
| | | | VDVSHEDPEVKFNWYVDGVEVHNAKTKPREEQYNSTY |
| | | | RVVSVLTVLHQDWLNGKEYKCKVSNKALPAPIEKTISK |
| | | | AKGQPREPQVYTLPPSREEMTKNQVSLTCLVKGFYPSDI |
| | | | AVEWESNGQPENNYKTTPPVLDSDGSFFLYSKLTVDKS |
| | | | RWQQGNVFSCSVMHEALHNHYTQKSLSLSPGK |
| | Light | 46 | DIQMTQSPSSLSASVGDRVTITCRSSQNIVHSNGNTYLD |
| | Chain | | WYQQTPGKAPKLLIYKVSNRFSGVPSRFSGSGSGTDFTF |
| | | | TISSLQPEDIATYYCFQYSHVPWTFGQGTKLEIKRTVAA |
| | | | PSVFIFPPSDEQLKSGTASVVCLLNNFYPREAKVQWKVD |
| | | | NALQSGNSQESVTEQDSKDSTYSLSSTLTLSKADYEKHK |
| | | | VYACEVTHQGLSSPVTKSFNRGEC |
| Zalutumumab | Heavy | 51 | QVQLVESGGGVVQPGRSLRLSCAASGFTFSTYGMHWV |
| | Chain | | RQAPGKGLEWVAVIWDDGSYKYYGDSVKGRFTISRDN |
| | | | SKNTLYLQMNSLRAEDTAVYYCARDGITMVRGVMKD |
| | | | YFDYWGQGTLVTVSSASTKGPSVFPLAPSSKSTSGGTAA |
| | | | LGCLVKDYFPEPVTVSWNSGALTSGVHTFPAVLQSSGL |
| | | | YSLSSVVTVPSSSLGTQTYICNVNHKPSNTKVDKKVEPK |
| | | | SCDKTHTCPPCPAPELLGGPSVFLFPPKPKDTLMISRTPE |
| | | | VTCVVVDVSHEDPEVKFNWYVDGVEVHNAKTKPREEQ |
| | | | YNSTYRVVSVLTVLHQDWLNGKEYKCKVSNKALPAPIE |
| | | | KTISKAKGQPREPQVYTLPPSREEMTKNQVSLTCLVKGF |
| | | | YPSDIAVEWESNGQPENNYKTTPPVLDSDGSFFLYSKLT |
| | | | VDKSRWQQGNVFSCSVMHEALHNHYTQKSLSLSPGK |
| | Light | 56 | AIQLTQSPSSLSASVGDRVTITCRASQDISSALVWYQQKP |
| | Chain | | GKAPKLLIYDASSLESGVPSRFSGSESGTDFTLTISSLQPE |
| | | | DFATYYCQQFNSYPLTFGGGTKVEIKRTVAAPSVFIFPPS |
| | | | DEQLKSGTASVVCLLNNFYPREAKVQWKVDNALQSGN |
| | | | SQESVTEQDSKDSTYSLSSTLTLSKADYEKHKVYACEVT |
| | | | HQGLSSPVTKSFNRGEC |
| Onartuzumab | Heavy | 61 | EVQLVESGGGLVQPGGSLRLSCAASGYTFTSYWLHWV |
| | Chain | | RQAPGKGLEWVGMIDPSNSDTRFNPNFKDRFTISADTSK |
| | | | NTAYLQMNSLRAEDTAVYYCATYRSYVTPLDYWGQGT |
| | | | LVTVSSASTKGPSVFPLAPSSKSTSGGTAALGCLVKDYF |
| | | | PEPVTVSWNSGALTSGVHTFPAVLQSSGLYSLSSVVTVP |
| | | | SSSLGTQTYICNVNHKPSNTKVDKKVEPKSCDKTHTCPP |
| | | | CPAPELLGGPSVFLFPPKPKDTLMISRTPEVTCVVVDVS |
| | | | HEDPEVKFNWYVDGVEVHNAKTKPREEQYNSTYRVVS |
| | | | VLTVLHQDWLNGKEYKCKVSNKALPAPIEKTISKAKGQ |
| | | | PREPQVYTLPPSREEMTKNQVSLTCLVKGFYPSDIAVEW |
| | | | ESNGQPENNYKTTPPVLDSDGSFFLYSKLTVDKSRWQQ |
| | | | GNVFSCSVMHEALHNHYTQKSLSLSPGK |
| | Light | 66 | DIQMTQSPSSLSASVGDRVTITCKSSQSLLYTSSQKNYLA |
| | Chain | | WYQQKPGKAPKLLIYWASTRESGVPSRFSGSGSGTDFT |
| | | | LTISSLQPEDFATYYCQQYYAYPWTFGQGTKVEIKRTV |
| | | | AAPSVFIFPPSDEQLKSGTASVVCLLNNFYPREAKVQWK |
| | | | VDNALQSGNSQESVTEQDSKDSTYSLSSTLTLSKADYEK |
| | | | HKVYACEVTHQGLSSPVTKSFNRGEC |
| Patritumab | Heavy | 71 | QVQLQQWGAGLLKPSETLSLTCAVYGGSFSGYYWSWI |
| | Chain | | RQPPGKGLEWIGEINHSGSTNYNPSLKSRVTISVETSKNQ |
| | | | FSLKLSSVTAADTAVYYCARDKWTWYFDLWGRGTLVT |
| | | | VSSASTKGPSVFPLAPSSKSTSGGTAALGCLVKDYFPEP |
| | | | VTVSWNSGALTSGVHTFPAVLQSSGLYSLSSVVTVPSSS |
| | | | LGTQTYICNVNHKPSNTKVDKKVEPKSCDKTHTCPPCP |
| | | | APELLGGPSVFLFPPKPKDTLMISRTPEVTCVVVDVSHE |
| | | | DPEVKFNWYVDGVEVHNAKTKPREEQYNSTYRVVSVL |
| | | | TVLHQDWLNGKEYKCKVSNKALPAPIEKTISKAKGQPR |
| | | | EPQVYTLPPSREEMTKNQVSLTCLVKGFYPSDIAVEWES |
| | | | NGQPENNYKTTPPVLDSDGSFFLYSKLTVDKSRWQQGN |
| | | | VFSCSVMHEALHNHYTQKSLSLSPGK |
| | Light | 76 | DIEMTQSPDSLAVSLGERATINCRSSQSVLYSSSNRNYL |
| | Chain | | AWYQQNPGQPPKLLIYWASTRESGVPDRFSGSGSGTDF |
| | | | TLTISSLQAEDVAVYYCQQYYSTPRTFGQGTKVEIKRTV |
| | | | AAPSVFIFPPSDEQLKSGTASVVCLLNNFYPREAKVQWK |
| | | | VDNALQSGNSQESVTEQDSKDSTYSLSSTLTLSKADYEK |
| | | | HKVYACEVTHQGLSSPVTKSFNRGEC |
| Clivatuzumab | Heavy | 81 | QVQLQQSGAEVKKPGASVKVSCEASGYTFPSYVLHWV |
| | Chain | | KQAPGQGLEWIGYINPYNDGTQYNEKFKGKATLTRDTS |
| | | | INTAYMELSRLRSDDTAVYYCARGFGGSYGFAYWGQG |
| | | | TLVTVSSASTKGPSVFPLAPSSKSTSGGTAALGCLVKDY |
| | | | FPEPVTVSWNSGALTSGVHTFPAVLQSSGLYSLSSVVTV |
| | | | PSSSLGTQTYICNVNHKPSNTKVDKKVEPKSCDKTHTCP |
| | | | PCPAPELLGGPSVFLFPPKPKDTLMISRTPEVTCVVVDVS |
| | | | HEDPEVKFNWYVDGVEVHNAKTKPREEQYNSTYRVVS |
| | | | VLTVLHQDWLNGKEYKCKVSNKALPAPIEKTISKAKGQ |
| | | | PREPQVYTLPPSREEMTKNQVSLTCLVKGFYPSDIAVEW |
| | | | ESNGQPENNYKTTPPVLDSDGSFFLYSKLTVDKSRWQQ |
| | | | GNVFSCSVMHEALHNHYTQKSLSLSPGK |
| | Light | 86 | DIQLTQSPSSLSASVGDRVTMTCSASSSVSSSYLYWYQQ |
| | Chain | | KPGKAPKLWIYSTSNLASGVPARFSGSGSGTDFTLTISSL |
| | | | QPEDSASYFCHQWNRYPYTFGGGTRLEIKRTVAAPSVFI |
| | | | FPPSDEQLKSGTASVVCLLNNFYPREAKVQWKVDNALQ |
| | | | SGNSQESVTEQDSKDSTYSLSSTLTLSKADYEKHKVYA |
| | | | CEVTHQGLSSPVTKSFNRGEC |
| Sofituzumab | Heavy | 91 | EVQLVESGGGLVQPGGSLRLSCAASGYSITNDYAWNW |
| | Chain | | VRQAPGKGLEWVGYISYSGYTTYNPSLKSRFTISRDTSK |
| | | | NTLYLQMNSLRAEDTAVYYCARWTSGLDYWGQGTLV |
| | | | TVSSASTKGPSVFPLAPSSKSTSGGTAALGCLVKDYFPE |
| | | | PVTVSWNSGALTSGVHTFPAVLQSSGLYSLSSVVTVPSS |
| | | | SLGTQTYICNVNHKPSNTKVDKKVEPKSCDKTHTCPPCP |
| | | | APELLGGPSVFLFPPKPKDTLMISRTPEVTCVVVDVSHE |
| | | | DPEVKFNWYVDGVEVHNAKTKPREEQYNSTYRVVSVL |
| | | | TVLHQDWLNGKEYKCKVSNKALPAPIEKTISKAKGQPR |
| | | | EPQVYTLPPSREEMTKNQVSLTCLVKGFYPSDIAVEWES |
| | | | NGQPENNYKTTPPVLDSDGSFFLYSKLTVDKSRWQQGN |
| | | | VFSCSVMHEALHNHYTQKSLSLSPGK |
| | Light | 96 | DIQMTQSPSSLSASVGDRVTITCKASDLIHNWLAWYQQ |
| | Chain | | KPGKAPKLLIYGATSLETGVPSRFSGSGSGTDFTLTISSL |
| | | | QPEDFATYYCQQYWTTPFTFGQGTKVEIKRTVAAPSVFI |
| | | | FPPSDEQLKSGTASVVCLLNNFYPREAKVQWKVDNALQ |
| | | | SGNSQESVTEQDSKDSTYSLSSTLTLSKADYEKHKVYA |
| | | | CEVTHQGLSSPVTKSFNRGEC |
| Edrecolomab | Heavy | 101 | QVQLQQSGAELVRPGTSVKVSCKASGYAFTNYLIEWVK |
| | Chain | | QRPGQGLEWIGVINPGSGGTNYNEKFKGKATLTADKSS |
| | | | STAYMQLSSLTSDDSAVYFCARDGPWFAYWGQGTLVT |
| | | | VSAASTKGPSVFPLAPSSKSTSGGTAALGCLVKDYFPEP |
| | | | VTVSWNSGALTSGVHTFPAVLQSSGLYSLSSVVTVPSSS |
| | | | LGTQTYICNVNHKPSNTKVDKKVEPKSCDKTHTCPPCP |
| | | | APELLGGPSVFLFPPKPKDTLMISRTPEVTCVVVDVSHE |
| | | | DPEVKFNWYVDGVEVHNAKTKPREEQYNSTYRVVSVL |
| | | | TVLHQDWLNGKEYKCKVSNKALPAPIEKTISKAKGQPR |
| | | | EPQVYTLPPSREEMTKNQVSLTCLVKGFYPSDIAVEWES |
| | | | NGQPENNYKTTPPVLDSDGSFFLYSKLTVDKSRWQQGN |
| | | | VFSCSVMHEALHNHYTQKSLSLSPGK |
| | Light | 106 | NIVMTQSPKSMSMSVGERVTLTCKASENVVTYVSWYQ |
| | Chain | | QKPEQSPKLLIYGASNRYTGVPDRFTGSGSATDFTLTISS |
| | | | VQAEDLADYHCGQGYSYPYTFGGGTKLEIKRTVAAPSV |
| | | | FIFPPSDEQLKSGTASVVCLLNNFYPREAKVQWKVDNA |
| | | | LQSGNSQESVIEQDSKDSTYSLSSTLTLSKADYEKHKVY |
| | | | ACEVTHQGLSSPVTKSFNRGEC |
| Adecatumumab | Heavy | 111 | EVQLLESGGGVVQPGRSLRLSCAASGFTFSSYGMHWVR |
| | Chain | | QAPGKGLEWVAVISYDGSNKYYADSVKGRFTISRDNSK |
| | | | NTLYLQMNSLRAEDTAVYYCAKDMGWGSGWRPYYYY |
| | | | GMDVWGQGTTVTVSSASTKGPSVFPLAPSSKSTSGGTA |
| | | | ALGCLVKDYFPEPVTVSWNSGALTSGVHTFPAVLQSSG |
| | | | LYSLSSVVTVPSSSLGTQTYICNVNHKPSNTKVDKKVEP |
| | | | KSCDKTHTCPPCPAPELLGGPSVFLFPPKPKDTLMISRTP |
| | | | EVTCVVVDVSHEDPEVKFNWYVDGVEVHNAKTKPREE |
| | | | QYNSTYRVVSVLTVLHQDWLNGKEYKCKVSNKALPAP |
| | | | IEKTISKAKGQPREPQVYTLPPSRDELTKNQVSLTCLVK |
| | | | GFYPSDIAVEWESNGQPENNYKTTPPVLDSDGSFFLYSK |
| | | | LTVDKSRWQQGNVFSCSVMHEALHNHYTQKSLSLSPG |
| | | | K |
| | Light | 116 | ELQMTQSPSS LSASVGDRVT ITCRTSQSIS |
| | Chain | | SYLNWYQQKP GQPPKLLIYW ASTRESGVPD |
| | | | RFSGSGSGTD FTLTISSLQP EDSATYYCQQ |
| | | | SYDIPYTFGQ GTKLEIKRTV AAPSVFIFPP |
| | | | SDEQLKSGTA SVVCLLNNFY PREAKVQWKV |
| | | | DNALQSGNSQ ESVTEQDSKD STYSLSSTLT |
| | | | LSKADYEKHK VYACEVTHQG LSSPVTKSFN RGEC |
| Anetumab | Heavy | 121 | QVELVQSGAEVKKPGESLKISCKGSGYSFTSYWIGWVR |
| | Chain | | QAPGKGLEWMGIIDPGDSRTRYSPSFQGQVTISADKSIST |
| | | | AYLQWSSLKASDTAMYYCARGQLYGGTYMDGWGQG |
| | | | TLVTVSSASTKGPSVFPLAPSSKSTSGGTAALGCLVKDY |
| | | | FPEPVTVSWNSGALTSGVHTFPAVLQSSGLYSLSSVVTV |
| | | | PSSSLGTQTYICNVNHKPSNTKVDKKVEPKSCDKTHTCP |
| | | | PCPAPELLGGPSVFLFPPKPKDTLMISRTPEVTCVVVDVS |
| | | | HEDPEVKFNWYVDGVEVHNAKTKPREEQYNSTYRVVS |
| | | | VLTVLHQDWLNGKEYKCKVSNKALPAPIEKTISKAKGQ |
| | | | PREPQVYTLPPSRDELTKNQVSLTCLVKGFYPSDIAVEW |
| | | | ESNGQPENNYKTTPPVLDSDGSFFLYSKLTVDKSRWQQ |
| | | | GNVFSCSVMHEALHNHYTQKSLSLSPGK |
| | Light | 126 | DIALTQPASVSGSPGQSITISCTGTSSDIGGYNSVSWYQQ |
| | Chain | | HPGKAPKLMIYGVNNRPSGVSNRFSGSKSGNTASLTISG |
| | | | LQAEDEADYYCSSYDIESATPVFGGGTKLTVLGQPKAA |
| | | | PSVTLFPPSSEELQANKATLVCLISDFYPGAVTVAWKGD |
| | | | SSPVKAGVETTTPSKQSNNKYAASSYLSLTPEQWKSHRS |
| | | | YSCQVTHEGSTVEKT VAPTECS |
| huDS6 | Heavy | 131 | QAQLVQSGAEVVKPGASVKMSCKASGYTFTSYNMHW |
| | Chain | | VKQTPGQGLEWIGYIYPGNGATNYNQKFQGKATLTADP |
| | | | SSSTAYMQISSLTSEDSAVYFCARGDSVPFAYWGQGTL |
| | | | VTVSAASTKGPSVFPLAPSSKSTSGGTAALGCLVKDYFP |
| | | | EPVTVSWNSGALTSGVHTFPAVLQSSGLYSLSSVVTVPS |
| | | | SSLGTQTYICNVNHKPSNTKVDKKVEPKSCDKTHTCPPC |
| | | | PAPELLGGPSVFLFPPKPKDTLMISRTPEVTCWVDVSHE |
| | | | DPEVKFNWYVDGVEVHNAKTKPREEQYNSTYRVVSVL |
| | | | TVLHQDWLNGKEYKCKVSNKALPAPIEKTISKAKGQPR |
| | | | EPQVYTLPPSRDELTKNQVSLTCLVKGFYPSDIAVEWES |
| | | | NGQPENNYKTTPPVLDSDGSFFLYSKLTVDKSRWQQGN |
| | | | VFSCSVMHEALHNHYTQKSLSLSPGK |
| | Light | 136 | EIVLTQSPATMSASPGERVTITCSAHSSVSFMHWFQQKP |
| | Chain | | GTSPKLWIYSTSSLASGVPARFGGSGSGTSYSLTISSMEA |
| | | | EDAATYYCQQRSSFPLTFGAGTKLELKRTVAAPSVFIFP |
| | | | PSDEQLKSGTASVVCLLNNFYPREAKVQWKVDNALQS |
| | | | GNSQESVTEQDSKDSTYSLSSTLTLSKADYEKHKVYAC |
| | | | EVTHQGLSSPVTKSFNRGEC |
| Lifastuzumab | Heavy | 141 | EVQLVESGGGLVQPGGSLRLSCAASGFSFSDFAMSWVR |
| | Chain | | QAPGKGLEWVATIGRVAFHTYYPDSMKGRFTISRDNSK |
| | | | NTLYLQMNSLRAEDTAVYYCARHRGFDVGHFDFWGQ |
| | | | GTLVTVSSASTKGPSVFPLAPSSKSTSGGTAALGCLVKD |
| | | | YFPEPVTVSWNSGALTSGVHTFPAVLQSSGLYSLSSVVT |
| | | | VPSSSLGTQTYICNVNHKPSNTKVDKKVEPKSCDKTHT |
| | | | CPPCPAPELLGGPSVFLFPPKPKDTLMISRTPEVTCVVVD |
| | | | VSHEDPEVKFNWYVDGVEVHNAKTKPREEQYNSTYRV |
| | | | VSVLTVLHQDWLNGKEYKCKVSNKALPAPIEKTISKAK |
| | | | GQPREPQVYTLPPSREEMTKNQVSLTCLVKGFYPSDIAV |
| | | | EWESNGQPENNYKTTPPVLDSDGSFFLYSKLTVDKSRW |
| | | | QQGNVFSCSVMHEALHNHYTQKSLSLSPGK |
| | Light | 146 | DIQMTQSPSSLSASVGDRVTITCRSSETLVHSSGNTYLE |
| | Chain | | WYQQKPGKAPKLLIYRVSNRFSGVPSRFSGSGSGTDFTL |
| | | | TISSLQPEDFATYYCFQGSFNPLTFGQGTKVEIKRTVAAP |
| | | | SVFIFPPSDEQLKSGTASVVCLLNNFYPREAKVQWKVD |
| | | | NALQSGNSQESVTEQDSKDSTYSLSSTLTLSKADYEKHK |
| | | | VYACEVTHQGLSSPVTKSFNRGEC |
| Sacituzumab | Heavy | 151 | QVQLQQSGSELKKPGASVKVSCKASGYTFTNYGMNWV |
| | Chain | | KQAPGQGLKWMGWINTYTGEPTYTDDFKGRFAFSLDT |
| | | | SVSTAYLQISSLKADDTAVYFCARGGFGSSYWYFDVWG |
| | | | QGSLVTVSSASTKGPSVFPLAPSSKSTSGGTAALGCLVK |
| | | | DYFPEPVTVSWNSGALTSGVHTFPAVLQSSGLYSLSSVV |
| | | | TVPSSSLGTQTYICNVNHKPSNTKVDKRVEPKSCDKTHT |
| | | | CPPCPAPELLGGPSVFLFPPKPKDTLMISRTPEVTCVVVD |
| | | | VSHEDPEVKFNWYVDGVEVHNAKTKPREEQYNSTYRV |
| | | | VSVLTVLHQDWLNGKEYKCKVSNKALPAPIEKTISKAK |
| | | | GQPREPQVYTLPPSREEMTKNQVSLTCLVKGFYPSDIAV |
| | | | EWESNGQPENNYKTTPPVLDSDGSFFLYSKLTVDKSRW |
| | | | QQGNVFSCSVMHEALHNHYTQKSLSLSPGK |
| | Light | 156 | DIQLTQSPSS LSASVGDRVS ITCKASQDVS |
| | Chain | | IAVAWYQQKP GKAPKLLIYS ASYRYTGVPD |
| | | | RFSGSGSGTD FTLTISSLQP EDFAVYYCQQ |
| | | | HYITPLTFGA GTKVEIKRTV AAPSVFIFPP |
| | | | SDEQLKSGTA SVVCLLNNFY PREAKVQWKV |
| | | | DNALQSGNSQ ESVTEQDSKD STYSLSSTLT |
| | | | LSKADYEKHK VYACEVTHQG LSSPVTKSFN RGEC |
| PR1A3 | Heavy | 161 | QVKLQQSGPELKKPGETVKISCKASGYTFTEFGMNWVK |
| | Chain | | QAPGKGLKWMGWINTKTGEATYVEEFKGRFAFSLETS |
| | | | ATTAYLQINNLKNEDTAKYFCARWDFYDYVEAMDYW |
| | | | GQGTTVTVSSASTKGPSVFPLAPSSKSTSGGTAALGCLV |
| | | | KDYFPEPVTVSWNSGALTSGVHTFPAVLQSSGLYSLSSV |
| | | | VTVPSSSLGTQTYICNVNHKPSNTKVDKKVEPKSCDKT |
| | | | HTCPPCPAPELLGGPSVFLFPPKPKDTLMISRTPEVTCVV |
| | | | VDVSHEDPEVKFNWYVDGVEVHNAKTKPREEQYNSTY |
| | | | RVVSVLTVLHQDWLNGKEYKCKVSNKALPAPIEKTISK |
| | | | AKGQPREPQVYTLPPSRDELTKNQVSLTCLVKGFYPSDI |
| | | | AVEWESNGQPENNYKTTPPVLDSDGSFFLYSKLTVDKS |
| | | | RWQQGNVFSCSVMHEALHNHYTQKSLSLSPGK |
| | Light | 166 | DIVMTQSQRFMSTSVGDRVSVTCKASQNVGTNVAWYQ |
| | Chain | | QKPGQSPKALIYSASYRYSGVPDRFTGSGSGTDFTLTISN |
| | | | VQSEDLAEYFCHQYYTYPLFTFGSGTKLEMKRTVAAPS |
| | | | VFIFPPSDEQLKSGTASVVCLLNNFYPREAKVQWKVDN |
| | | | ALQSGNSQESVTEQDSKDSTYSLSSTLTLSKADYEKHKV |
| | | | YACEVTHQGLSSPVTKSFNRGEC |
| Humanized | Heavy | 171 | QVQLVQSGAEVKKPGASVKVSCKASGYTFTEFGMNWV |
| PR1A3 | Chain | | RQAPGQGLEWMGWINTKTGEATYVEEFKGRVTFTTDT |
| | | | STSTAYMELRSLRSDDTAVYYCARWDFAYYVEAMDY |
| | | | WGQGTTVTVSSASTKGPSVFPLAPSSKSTSGGTAALGCL |
| | | | VKDYFPEPVTVSWNSGALTSGVHTFPAVLQSSGLYSLSS |
| | | | VVTVPSSSLGTQTYICNVNHKPSNTKVDKKVEPKSCDK |
| | | | THTCPPCPAPELLGGPSVFLFPPKPKDTLMISRTPEVTCV |
| | | | VVDVSHEDPEVKFNWYVDGVEVHNAKTKPREEQYNST |
| | | | YRVVSVLTVLHQDWLNGKEYKCKVSNKALPAPIEKTIS |
| | | | KAKGQPREPQVYTLPPSREEMTKNQVSLTCLVKGFYPS |
| | | | DIAVEWESNGQPENNYKTTPPVLDSDGSFFLYSKLTVD |
| | | | KSRWQQGNVFSCSVMHEALHNHYTQKSLSLSPGK |
| | Light | 176 | DIQMTQSPSSLSASVGDRVTITCKASAAVGTYVAWYQQ |
| | Chain | | KPGKAPKLLIYSASYRKRGVPSRFSGSGSGTDFTLTISSL |
| | | | QPEDFATYYCHQYYTYPLFTFGQGTKLEIKRTVAAPSVF |
| | | | IFPPSDEQLKSGTASVVCLLNNFYPREAKVQWKVDNAL |
| | | | QSGNSQESVTEQDSKDSTYSLSSTLTLSKADYEKHKVY |
| | | | ACEVTHQGLSSPVTKSFNRGEC |
| Humanized Ab2-3 | Heavy | 181 | EVQLQESGPGLVKPGGSLSLSCAASGFVFSSYDMSWVR |
| | Chain | | QTPERGLEWVAYISSGGGITYAPSTVKGRFTVSRDNAK |
| | | | NTLYLQMNSLTSEDTAVYYCAAHYFGSSGPFAYWGQG |
| | | | TLVTVSSASTKGPSVFPLAPSSKSTSGGTAALGCLVKDY |
| | | | FPEPVTVSWNSGALTSGVHTFPAVLQSSGLYSLSSVVTV |
| | | | PSSSLGTQTYICNVNHKPSNTKVDKKVEPKSCDKTHTCP |
| | | | PCPAPELLGGPSVFLFPPKPKDTLMISRTPEVTCVVVDVS |
| | | | HEDPEVKFNWYVDGVEVHNAKTKPREEQYNSTYRVVS |
| | | | VLTVLHQDWLNGKEYKCKVSNKALPAPIEKTISKAKGQ |
| | | | PREPQVYTLPPSREEMTKNQVSLTCLVKGFYPSDIAVEW |
| | | | ESNGQPENNYKTTPPVLDSDGSFFLYSKLTVDKSRWQQ |
| | | | GNVFSCSVMHEALHNHYTQKSLSLSPGK |
| | Light | 186 | DIQMTQSPASLSASVGDRVTITCRASENIFSYLAWYQQK |
| | Chain | | PGKSPKLLVYNTRTLAEGVPSRFSGSGSGTDFSLTISSLQ |
| | | | PEDFATYYCQHHYGTPFTFGSGTKLEIKRTVAAPSVFIFP |
| | | | PSDEQLKSGTASVVCLLNNFYPREAKVQWKVDNALQS |
| | | | GNSQESVTEQDSKDSTYSLSSTLTLSKADYEKHKVYAC |
| | | | EVTHQGLSSPVTKSFNRGEC |
| IMAB362, | Heavy | 191 | QVQLQQPGAELVRPGASVKLSCKASGYTFTSYWINWV |
| CLAUDIXIMAB | Chain | | KQRPGQGLEWIGNIYPSDSYTNYNQKFKDKATLTVDKS |
| | | | SSTAYMQLSSPTSEDSAVYYCTRSWRGNSFDYWGQGTT |
| | | | LTVSSASTKGPSVFPLAPSSKSTSGGTAALGCLVKDYFP |
| | | | EPVTVSWNSGALTSGVHTFPAVLQSSGLYSLSSVVTVPS |
| | | | SSLGTQTYICNVNHKPSNTKVDKKVEPKSCDKTHTCPPC |
| | | | PAPELLGGPSVFLFPPKPKDTLMISRTPEVTCVVVDVSHE |
| | | | DPEVKFNWYVDGVEVHNAKTKPREEQYNSTYRVVSVL |
| | | | TVLHQDWLNGKEYKCKVSNKALPAPIEKTISKAKGQPR |
| | | | EPQVYTLPPSREEMTKNQVSLTCLVKGFYPSDIAVEWES |
| | | | NGQPENNYKTTPPVLDSDGSFFLYSKLTVDKSRWQQGN |
| | | | VFSCSVMHEALHNHYTQKSLSLSPGK |
| | Light | 196 | DIVMTQSPSSLTVTAGEKVTMSCKSSQSLLNSGNQKNY |
| | Chain | | LTWYQQKPGQPPKLLIYWASTRESGVPDRFTGSGSGTD |
| | | | FTLTISSVQAEDLAVYYCQNDYSYPFTFGSGTKLEIKRT |
| | | | VAAPSVFIFPPSDEQLKSGTASVVCLLNNFYPREAKVQW |
| | | | KVDNALQSGNSQESVTEQDSKDSTYSLSSTLTLSKADYE |
| | | | KHKVYACEVTHQGLSSPVTKSFNRGEC |
| AMG595 | Heavy | 201 | QVQLVESGGGVVQSGRSLRLSCAASGFTFRNYGMHWV |
| | Chain | | RQAPGKGLEWVAVIWYDGSDKYYADSVRGRFTISRDN |
| | | | SKNTLYLQMNSLRAEDTAVYYCARDGYDILTGNPRDFD |
| | | | YWGQGTLVTVSSASTKGPSVFPLAPSSKSTSGGTAALGC |
| | | | LVKDYFPEPVTVSWNSGALTSGVHTFPAVLQSSGLYSLS |
| | | | SVVTVPSSSLGTQTYICNVNHKPSNTKVDKKVEPKSCD |
| | | | KTHTCPPCPAPELLGGPSVFLFPPKPKDTLMISRTPEVTC |
| | | | VVVDVSHEDPEVKFNWYVDGVEVHNAKTKPREEQYNS |
| | | | TYRVVSVLTVLHQDWLNGKEYKCKVSNKALPAPIEKTI |
| | | | SKAKGQPREPQVYTLPPSREEMTKNQVSLTCLVKGFYP |
| | | | SDIAVEWESNGQPENNYKTTPPVLDSDGSFFLYSKLTVD |
| | | | KSRWQQGNVFSCSVMHEALHNHYTQKSLSLSPGK |
| | Light | 206 | DTVMTQTPLSSHVTLGQPASISCRSSQSLVHSDGNTYLS |
| | Chain | | WLQQRPGQPPRLLIYRISRRFSGVPDRFSGSGAGTDFTLE |
| | | | ISRVEAEDVGVYYCMQSTHVPRTFGQGTKVEIKRTVAA |
| | | | PSVFIFPPSDEQLKSGTASVVCLLNNFYPREAKVQWKVD |
| | | | NALQSGNSQESVTEQDSKDSTYSLSSTLTLSKADYEKHK |
| | | | VYACEVTHQGLSSPVTKSFNRGEC |
| ABT806 | Heavy | 211 | EVQLQESGPGLVKPSQTLSLTCTVSGYSISRDFAWNWIR |
| | Chain | | QPPGKGLEWMGYISYNGNTRYQPSLKSRITISRDTSKNQ |
| | | | FFLKLNSVTAADTATYYCVTASRGFPYWGQGTLVTVSS |
| | | | ASTKGPSVFPLAPSSKSTSGGTAALGCLVKDYFPEPVTV |
| | | | SWNSGALTSGVHTFPAVLQSSGLYSLSSVVTVPSSSLGT |
| | | | QTYICNVNHKPSNTKVDKKVEPKSCDKTHTCPPCPAPEL |
| | | | LGGPSVFLFPPKPKDTLMISRTPEVTCVVVDVSHEDPEV |
| | | | KFNWYVDGVEVHNAKTKPREEQYNSTYRVVSVLTVLH |
| | | | QDWLNGKEYKCKVSNKALPAPIEKTISKAKGQPREPQV |
| | | | YTLPPSREEMTKNQVSLTCLVKGFYPSDIAVEWESNGQP |
| | | | ENNYKTTPPVLDSDGSFFLYSKLTVDKSRWQQGNVFSC |
| | | | SVMHEALHNHYTQKSLSLSPGK |
| | Light | 216 | DIQMTQSPSSMSVSVGDRVTITCHSSQDINSNIGWLQQK |
| | Chain | | PGKSFKGLIYHGTNLDDGVPSRFSGSGSGTDYTLTISSLQ |
| | | | PEDFATYYCVQYAQFPWTFGGGTKLEIKRTVAAPSVFIF |
| | | | PPSDEQLKSGTASVVCLLNNFYPREAKVQWKVDNALQS |
| | | | GNSQESVTEQDSKDSTYSLSSTLTLSKADYEKHKVYAC |
| | | | EVTHQGLSSPVTKSFNRGEC |
| Sibrotuzumab | Heavy | 221 | QVQLVQSGAEVKKPGASVKVSCKTSRYTFILYTIHWVR |
| | Chain | | QAPGQRLEWIGGINPNNGIPNYNQKFKGRVTITVDTSAS |
| | | | TAYMELSSLRSEDTAVYYCARRRIAYGYDEGHAMDYW |
| | | | GQGTLVTVSSASTKGPSVFPLAPSSKSTSGGTAALGCLV |
| | | | KDYFPEPVTVSWNSGALTSGVHTFPAVLQSSGLYSLSSV |
| | | | VTVPSSSLGTQTYICNVNHKPSNTKVDKKVEPKSCDKT |
| | | | HTCPPCPAPELLGGPSVFLFPPKPKDTLMISRTPEVTCVV |
| | | | VDVSHEDPEVKFNWYVDGVEVHNAKTKPREEQYNSTY |
| | | | RVVSVLTVLHQDWLNGKEYKCKVSNKALPAPIEKTISK |
| | | | AKGQPREPQVYTLPPSREEMTKNQVSLTCLVKGFYPSDI |
| | | | AVEWESNGQPENNYKTTPPVLDSDGSFFLYSKLTVDKS |
| | | | RWQQGNVFSCSVMHEALHNHYTQKSLSLSPGK |
| | Light | 226 | DIVMTQSPDSLAVSLGERATINCKSSQSLLYSRNQKNYL |
| | Chain | | AWYQQKPGQPPKLLIFWASTRESGVPDRFSGSGFGTDFT |
| | | | LTISSLQAEDVAVYYCQQYFSYPLTFGQGTKVEIKRTVA |
| | | | APSVFIFPPSDEQLKSGTASVVCLLNNFYPREAKVQWKV |
| | | | DNALQSGNSQESVTEQDSKDSTYSLSSTLTLSKADYEKH |
| | | | KVYACEVTHQGLSSPVTKSFNRGEC |
| DS-8895a variant | Heavy | 231 | QVQLVQSGAEVKKPGASVKVSCKASGYTFIDYSMHWV |
| 1 | Chain | | RQAPGQGLEWMGWINTYTGEPTYSDDFKGRVTITADTS |
| | | | TSTAYLELSSLRSEDTAVYYCATYYRYERDFDYWGQGT |
| | | | LVTVSSASTKGPSVFPLAPSSKSTSGGTAALGCLVKDYF |
| | | | PEPVTVSWNSGALTSGVHTFPAVLQSSGLYSLSSVVTVP |
| | | | SSSLGTQTYICNVNHKPSNTKVDKKVEPKSCDKTHTCPP |
| | | | CPAPELLGGPSVFLFPPKPKDTLMISRTPEVTCVVVDVS |
| | | | HEDPEVKFNWYVDGVEVHNAKTKPREEQYNSTYRVVS |
| | | | VLTVLHQDWLNGKEYKCKVSNKALPAPIEKTISKAKGQ |
| | | | PREPQVYTLPPSREEMTKNQVSLTCLVKGFYPSDIAVEW |
| | | | ESNGQPENNYKTTPPVLDSDGSFFLYSKLTVDKSRWQQ |
| | | | GNVFSCSVMHEALHNHYTQKSLSLSPGK |
| | Light | 236 | DIVMTQSPLSLPVTPGEPASISCRSSQSIVHSSGITYLEWY |
| | Chain | | LQKPGQSPQLLIYKVSNRFSGVPDRFSGSGSGTDFTLKIS |
| | | | RVEAEDVGVYYCFQGSHVPYTFGQGTKVEIKRTVAAPS |
| | | | VFIFPPSDEQLKSGTASVVCLLNNFYPREAKVQWKVDN |
| | | | ALQSGNSQESVTEQDSKDSTYSLSSTLTLSKADYEKHKV |
| | | | YACEVTHQGLSSPVTKSFNRGEC |
| DS-8895a variant | Heavy | 241 | QIQLVQSGAEVKKPGASVKVSCKASGYTFIDYSMHWVR |
| 2 | Chain | | QAPGQGLKWMGWINTYTGEPTYSDDFKGRFAFSLDTST |
| | | | STAYLELSSLRSEDTAVYYCATYYRYERDFDYWGQGTL |
| | | | VTVSSASTKGPSVFPLAPSSKSTSGGTAALGCLVKDYFP |
| | | | EPVTVSWNSGALTSGVHTFPAVLQSSGLYSLSSVVTVPS |
| | | | SSLGTQTYICNVNHKPSNTKVDKKVEPKSCDKTHTCPPC |
| | | | PAPELLGGPSVFLFPPKPKDTLMISRTPEVTCVVVDVSHE |
| | | | DPEVKFNWYVDGVEVHNAKTKPREEQYNSTYRVVSVL |
| | | | TVLHQDWLNGKEYKCKVSNKALPAPIEKTISKAKGQPR |
| | | | EPQVYTLPPSREEMTKNQVSLTCLVKGFYPSDIAVEWES |
| | | | NGQPENNYKTTPPVLDSDGSFFLYSKLTVDKSRWQQGN |
| | | | VFSCSVMHEALHNHYTQKSLSLSPGK |
| | Light | 246 | DVLMTQSPLSLPVTPGEPASISCRSSQSIVHSSGITYLEW |
| | Chain | | YLQKPGQSPQLLIYKVSNRFSGVPDRFSGSGSGTDFTLKI |
| | | | SRVEAEDVGVYYCFQGSHVPYTFGQGTKVEIKRTVAAP |
| | | | SVFIFPPSDEQLKSGTASVVCLLNNFYPREAKVQWKVD |
| | | | NALQSGNSQESVTEQDSKDSTYSLSSTLTLSKADYEKHK |
| | | | VYACEVTHQGLSSPVTKSFNRGEC |
| MEDI-547 | Heavy | 251 | EVQLLESGGGLVQPGGSLRLSCAASGFTFSHYMMAWV |
| | Chain | | RQAPGKGLEWVSRIGPSGGPTHYADSVKGRFTISRDNSK |
| | | | NTLYLQMNSLRAEDTAVYYCAGYDSGYDYVAVAGPA |
| | | | EYFQHWGQGTLVTVSSASTKGPSVFPLAPSSKSTSGGTA |
| | | | ALGCLVKDYFPEPVTVSWNSGALTSGVHTFPAVLQSSG |
| | | | LYSLSSVVTVPSSSLGTQTYICNVNHKPSNTKVDKKVEP |
| | | | KSCDKTHTCPPCPAPELLGGPSVFLFPPKPKDTLMISRTP |
| | | | EVTCVVVDVSHEDPEVKFNWYVDGVEVHNAKTKPREE |
| | | | QYNSTYRVVSVLTVLHQDWLNGKEYKCKVSNKALPAP |
| | | | IEKTISKAKGQPREPQVYTLPPSREEMTKNQVSLTCLVK |
| | | | GFYPSDIAVEWESNGQPENNYKTTPPVLDSDGSFFLYSK |
| | | | LTVDKSRWQQGNVFSCSVMHEALHNHYTQKSLSLSPG |
| | | | K |
| | Light | 256 | DIQMTQSPSSLSASVGDRVTITCRASQSISTWLAWYQQK |
| | Chain | | PGKAPKLLIYKASNLHTGVPSRFSGSGSGTEFSLTISGLQ |
| | | | PDDFATYYCQQYNSYSRTFGQGTKVEIKRTVAAPSVFIF |
| | | | PPSDEQLKSGTASVVCLLNNFYPREAKVQWKVDNALQS |
| | | | GNSQESVTEQDSKDSTYSLSSTLTLSKADYEKHKVYAC |
| | | | EVTHQGLSSPVTKSFNRGEC |
| Narnatumab | Heavy | 261 | EVQLVESGGGLVQPGGSLRLSCAASGFTFSSYLMTWVR |
| | Chain | | QAPGKGLEWVANIKQDGSEKYYVDSVKGRFTISRDNA |
| | | | KNSLNLQMNSLRAEDTAVYYCTRDGYSSGRHYGMDV |
| | | | WGQGTTVIVSSASTKGPSVFPLAPSSKSTSGGTAALGCL |
| | | | VKDYFPEPVTVSWNSGALTSGVHTFPAVLQSSGLYSLSS |
| | | | VVTVPSSSLGTQTYICNVNHKPSNTKVDKRVEPKSCDK |
| | | | THTCPPCPAPELLGGPSVFLFPPKPKDTLMISRTPEVTCV |
| | | | VVDVSHEDPEVKFNWYVDGVEVHNAKTKPREEQYNST |
| | | | YRVVSVLTVLHQDWLNGKEYKCKVSNKALPAPIEKTIS |
| | | | KAKGQPREPQVYTLPPSREEMTKNQVSLTCLVKGFYPS |
| | | | DIAVEWESNGQPENNYKTTPPVLDSDGSFFLYSKLTVD |
| | | | KSRWQQGNVFSCSVMHEALHNHYTQKSLSLSPGK |
| | Light | 266 | EIVLTQSPATLSLSPGERATLSCRASQSVSRYLAWYQQK |
| | Chain | | PGQAPRLLIYDASNRATGIPARFSGSGSGTDFTLTISSLEP |
| | | | EDFAVYYCQQRSNWPRTFGQGTKVEIKRTVAAPSVFIFP |
| | | | PSDEQLKSGTASVVCLLNNFYPREAKVQWKVDNALQS |
| | | | GNSQESVTEQDSKDSTYSLSSTLTLSKADYEKHKVYAC |
| | | | EVTHQGLSSPVTKSFNRGEC |
| RG7841 | Heavy | 271 | EVQLVESGPALVKPTQTLTLTCTVSGFSLTGYSVNWIRQ |
| | Chain | | PPGKALEWLGMIWGDGSTDYNSALKSRLTISKDTSKNQ |
| | | | VVLTMTNMDPVDTATYYCARDYYFNYASWFAYWGQG |
| | | | TLVTVSSASTKGPSVFPLAPSSKSTSGGTAALGCLVKDY |
| | | | FPEPVTVSWNSGALTSGVHTFPAVLQSSGLYSLSSVVTV |
| | | | PSSSLGTQTYICNVNHKPSNTKVDKKVEPKSCDKTHTCP |
| | | | PCPAPELLGGPSVFLFPPKPKDTLMISRTPEVTCVVVDVS |
| | | | HEDPEVKFNWYVDGVEVHNAKTKPREEQYNSTYRVVS |
| | | | VLTVLHQDWLNGKEYKCKVSNKALPAPIEKTISKAKGQ |
| | | | PREPQVYTLPPSREEMTKNQVSLTCLVKGFYPSDIAVEW |
| | | | ESNGQPENNYKTTPPVLDSDGSFFLYSKLTVDKSRWQQ |
| | | | GNVFSCSVMHEALHNHYTQKSLSLSPGK |
| | Light | 276 | DIQMTQSPSSLSASVGDRVTITCSASQGISNYLNWYQQK |
| | Chain | | PGKTVKLLIYYTSNLHSGVPSRFSGSGSGTDYTLTISSLQ |
| | | | PEDFATYYCQQYSELPWTFGQGTKVEIKRTVAAPSVFIF |
| | | | PPSDEQLKSGTASVVCLLNNFYPREAKVQWKVDNALQS |
| | | | GNSQESVTEQDSKDSTYSLSSTLTLSKADYEKHKVYAC |
| | | | EVTHQGLSSPVTKSFNRGEC |
| Farletuzumab | Heavy | 281 | EVQLVESGGGVVQPGRSLRLSCSASGFTFSGYGLSWVR |
| | Chain | | QAPGKGLEWVAMISSGGSYTYYADSVKGRFAISRDNAK |
| | | | NTLFLQMDSLRPEDTGVYFCARHGDDPAWFAYWGQGT |
| | | | PVTVSSASTKGPSVFPLAPSSKSTSGGTAALGCLVKDYF |
| | | | PEPVTVSWNSGALTSGVHTFPAVLQSSGLYSLSSVVTVP |
| | | | SSSLGTQTYICNVNHKPSNTKVDKKVEPKSCDKTHTCPP |
| | | | CPAPELLGGPSVFLFPPKPKDTLMISRTPEVTCVVVDVS |
| | | | HEDPEVKFNWYVDGVEVHNAKTKPREEQYNSTYRVVS |
| | | | VLTVLHQDWLNGKEYKCKVSNKALPAPIEKTISKAKGQ |
| | | | PREPQVYTLPPSRDELTKNQVSLTCLVKGFYPSDIAVEW |
| | | | ESNGQPENNYKTTPPVLDSDGSFFLYSKLTVDKSRWQQ |
| | | | GNVFSCSVMHEALHNHYTQKSLSLSPGK |
| | Light | 286 | DIQLTQSPSSLSASVGDRVTITCSVSSSISSNNLHWYQQK |
| | Chain | | PGKAPKPWIYGTSNLASGVPSRFSGSGSGTDYTFTISSLQ |
| | | | PEDIATYYCQQWSSYPYMYTFGQGTKVEIKRTVAAPSV |
| | | | FIFPPSDEQLKSGTASVVCLLNNFYPREAKVQWKVDNA |
| | | | LQSGNSQESV1EQDSKDSTYSLSSTLTLSKADYEKHKVY |
| | | | ACEVTHQGLSSPVTKSFNRGEC |
| Mirvetuximab | Heavy | 291 | QVQLVQSGAEVVKPGASVKISCKASGYTFTGYFMNWV |
| | Chain | | KQSPGQSLEWIGRIHPYDGDTFYNQKFQGKATLTVDKS |
| | | | SNTAHMELLSLTSEDFAVYYCTRYDGSRAMDYWGQGT |
| | | | TVTVSSAS |
| | | | TKGPSVFPLAPSSKSTSGGTAALGCLVKDYFPEPVTVSW |
| | | | NSGALTSGVHTFPAVLQSSGLYSLSSVVTVPSSSLGTQT |
| | | | YICNVNHKPSNTKVDKKVEPKSCDKTHTCPPCPAPELLG |
| | | | GPSVFLFPPKPKDTLMISRTPEVTCVVVDVSHEDPEVKF |
| | | | NWYVDGVEVHNAKTKPREEQYNSTYRVVSVLTVLHQD |
| | | | WLNGKEYKCKVSNKALPAPIEKTISKAKGQPREPQVYT |
| | | | LPPSRDELTKNQVSLTCLVKGFYPSDIAVEWESNGQPEN |
| | | | NYKTTPPVLDSDGSFFLYSKLTVDKSRWQQGNVFSCSV |
| | | | MHEALHNHYTQKSLSLSPG |
| | Light | 296 | DIVLTQSPLSLAVSLGQPAIISCKASQSVSFAGTSLMHWY |
| | Chain | | HQKPGQQPRLLIYRASNLEAGVPDRFSGSGSKTDFTLTIS |
| | | | PVEAEDAATYYCQQSREYPYTFGGGTKLEIKRTVAAPS |
| | | | VFIFPPSDEQLKSGTASVVCLLNNFYPREAKVQWKVDN |
| | | | ALQSGNSQESVTEQDSKDSTYSLSSTLTLSKADYEKHKV |
| | | | YACEVTHQGLSSPVTKSFNRGEC |
| J591 variant 1 | Heavy | 301 | EVQLQQSGPELKKPGTSVRISCKTSGYTFTEYTIHWVKQ |
| | Chain | | SHGKSLEWIGNINPNNGGTTYNQKFEDKATLTVDKSSST |
| | | | AYMELRSLTSEDSAVYYCAAGWNFDYWGQGTTLTVSS |
| | | | ASTKGPSVFPLAPSSKSTSGGTAALGCLVKDYFPEPVTV |
| | | | SWNSGALTSGVHTFPAVLQSSGLYSLSSVVTVPSSSLGT |
| | | | QTYICNVNHKPSNTKVDKKVEPKSCDKTHTCPPCPAPEL |
| | | | LGGPSVFLFPPKPKDTLMISRTPEVTCVVVDVSHEDPEV |
| | | | KFNWYVDGVEVHNAKTKPREEQYNSTYRVVSVLTVLH |
| | | | QDWLNGKEYKCKVSNKALPAPIEKTISKAKGQPREPQV |
| | | | YTLPPSREEMTKNQVSLTCLVKGFYPSDIAVEWESNGQP |
| | | | ENNYKTTPPVLDSDGSFFLYSKLTVDKSRWQQGNVFSC |
| | | | SVMHEALHNHYTQKSLSLSPGK |
| | Light | 306 | DIVMTQSHKFMSTSVGDRVSIICKASQDVGTAVDWYQQ |
| | Chain | | KPGQSPKLLIYWASTRHTGVPDRFTGSGSGTDFTLTITN |
| | | | VQSEDLADYFCQQYNSYPLTFGAGTMLDLKRTVAAPSV |
| | | | FIFPPSDEQLKSGTASVVCLLNNFYPREAKVQWKVDNA |
| | | | LQSGNSQESV1EQDSKDSTYSLSSTLTLSKADYEKHKVY |
| | | | ACEVTHQGLSSPVTKSFNRGEC |
| J591 variant 2 | Heavy | 311 | EVQLQQSGPELVKPGTSVRISCKTSGYTFTEYTIHWVKQ |
| | Chain | | SHGKSLEWIGNINPNNGGTTYNQKFEDKATLTVDKSSST |
| | | | AYMELRSLTSEDSAVYYCAAGWNFDYWGQGTTLTVSS |
| | | | ASTKGPSVFPLAPSSKSTSGGTAALGCLVKDYFPEPVTV |
| | | | SWNSGALTSGVHTFPAVLQSSGLYSLSSVVTVPSSSLGT |
| | | | QTYICNVNHKPSNTKVDKKVEPKSCDKTHTCPPCPAPEL |
| | | | LGGPSVFLFPPKPKDTLMISRTPEVTCVVVDVSHEDPEV |
| | | | KFNWYVDGVEVHNAKTKPREEQYNSTYRVVSVLTVLH |
| | | | QDWLNGKEYKCKVSNKALPAPIEKTISKAKGQPREPQV |
| | | | YTLPPSREEMTKNQVSLTCLVKGFYPSDIAVEWESNGQP |
| | | | ENNYKTTPPVLDSDGSFFLYSKLTVDKSRWQQGNVFSC |
| | | | SVMHEALHNHYTQKSLSLSPGK |
| | Light | 316 | NIVMTQSPKSMSMSVGERVTLTCKASENVVTYVSWYQ |
| | Chain | | QKPEQSPKLLIYGASNRYTGVPDRFTGSGSATDFTLTISS |
| | | | VQAEDLADYHCGQGYSYPYTFGGGTKLEIKRTVAAPSV |
| | | | FIFPPSDEQLKSGTASVVCLLNNFYPREAKVQWKVDNA |
| | | | LQSGNSQESVTEQDSKDSTYSLSSTLTLSKADYEKHKVY |
| | | | ACEVTHQGLSSPVTKSFNRGEC |
| Rovalpituzumab | Heavy | 321 | QVQLVQSGAEVKKPGASVKVSCKASGYTFTNYGMNW |
| | Chain | | VRQAPGQGLEWMGWINTYTGEPTYADDFKGRVTMTT |
| | | | DTSTSTAYMELRSLRSDDTAVYYCARIGDSSPSDYWGQ |
| | | | GTLVTVSSASTKGPSVFPLAPSSKSTSGGTAALGCLVKD |
| | | | YFPEPVTVSWNSGALTSGVHTFPAVLQSSGLYSLSSVVT |
| | | | VPSSSLGTQTYICNVNHKPSNTKVDKKVEPKSCDKTHT |
| | | | CPPCPAPELLGGPSVFLFPPKPKDTLMISRTPEVTCVVVD |
| | | | VSHEDPEVKFNWYVDGVEVHNAKTKPREEQYNSTYRV |
| | | | VSVLTVLHQDWLNGKEYKCKVSNKALPAPIEKTISKAK |
| | | | GQPREPQVYTLPPSRDELTKNQVSLTCLVKGFYPSDIAV |
| | | | EWESNGQPENNYKTTPPVLDSDGSFFLYSKLTVDKSRW |
| | | | QQGNVFSCSVMHEALHNHYTQKSLSLSPG |
| | Light | 326 | EIVMTQSPATLSVSPGERATLSCKASQSVSNDVVWYQQ |
| | Chain | | KPGQAPRLLIYYASNRYTGIPARFSGSGSGIEFTLTISSLQ |
| | | | SEDFAVYYCQQDYTSPWTFGQGTKLEIKRTVAAPSVFIF |
| | | | PPSDEQLKSGTASVVCLLNNFYPREAKVQWKVDNALQS |
| | | | GNSQESVTEQDSKDSTYSLSSTLTLSKADYEKHKVYAC |
| | | | EVTHQGLSSPVTKSFNRGEC |
| PF-06647020 | Heavy | 331 | QVQLVQSGPEVKKPGASVKVSCKASGYTFTDYAVHWV |
| | Chain | | RQAPGKRLEWIGVISTYNDYTYNNQDFKGRVTMTRDTS |
| | | | ASTAYMELSRLRSEDTAVYYCARGNSYFYALDYWGQG |
| | | | TSVTVSSASTKGPSVFPLAPSSKSTSGGTAALGCLVKDY |
| | | | FPEPVTVSWNSGALTSGVHTFPAVLQSSGLYSLSSVVTV |
| | | | PSSSLGTQTYICNVNHKPSNTKVDKKVEPKSCDKTHTCP |
| | | | PCPAPELLGGPSVFLFPPKPKDTLMISRTPEVTCVVVDVS |
| | | | HEDPEVKFNWYVDGVEVHNAKTKPREEQYNSTYRVVS |
| | | | VLTVLHQDWLNGKEYKCKVSNKALPAPIEKTISKAKGQ |
| | | | PREPQVYTLPPSREEMTKNQVSLTCLVKGFYPSDIAVEW |
| | | | ESNGQPENNYKTTPPVLDSDGSFFLYSKLTVDKSRWQQ |
| | | | GNVFSCSVMHEALHNHYTQKSLSLSPGK |
| | Light | 336 | EIVLTQSPATLSLSPGERATLSCRASESVDSYGKSFMHW |
| | Chain | | YQQKPGQAPRLLIYRASNLESGIPARFSGSGSGTDFTLTI |
| | | | SSLEPEDFAVYYCQQSNEDPWTFGGGTKLEIKRTVAAPS |
| | | | VFIFPPSDEQLKSGTASVVCLLNNFYPREAKVQWKVDN |
| | | | ALQSGNSQESVTEQDSKDSTYSLSSTLTLSKADYEKHKV |
| | | | YACEVTHQGLSSPVTKSFNRGEC |
| Antibody to PTK7 | Heavy | 341 | QVQLVESGGGVVQPGRSLRLSCAASGFTFSSYAFHWVR |
| | Chain | | QAPGKGLEWVAVISYDGSIKYYADSVKGRFTISRDNSK |
| | | | NTLYLQMNSLRAEDTAVYYCARTYYFDYWGQGTLVT |
| | | | VSSASTKGPSVFPLAPSSKSTSGGTAALGCLVKDYFPEP |
| | | | VTVSWNSGALTSGVHTFPAVLQSSGLYSLSSVVTVPSSS |
| | | | LGTQTYICNVNHKPSNTKVDKKVEPKSCDKTHTCPPCP |
| | | | APELLGGPSVFLFPPKPKDTLMISRTPEVTCVVVDVSHE |
| | | | DPEVKFNWYVDGVEVHNAKTKPREEQYNSTYRVVSVL |
| | | | TVLHQDWLNGKEYKCKVSNKALPAPIEKTISKAKGQPR |
| | | | EPQVYTLPPSREEMTKNQVSLTCLVKGFYPSDIAVEWES |
| | | | NGQPENNYKTTPPVLDSDGSFFLYSKLTVDKSRWQQGN |
| | | | VFSCSVMHEALHNHYTQKSLSLSPGK |
| | Light | 346 | EIVLTQSPDFQSVTPKEKVTITCRASQSIGSSLHWYQQKP |
| | Chain | | DQSPKLLIKYASQSFSGVPSRFSGSGSGTDFTLTINSLEAE |
| | | | DAAAYYCHQSSSLPITFGQGTRLEIKRTVAAPSVFIFPPS |
| | | | DEQLKSGTASVVCLLNNFYPREAKVQWKVDNALQSGN |
| | | | SQESVTEQDSKDSTYSLSSTLTLSKADYEKHKVYACEVT |
| | | | HQGLSSPVTKSFNRGEC |
| Ladiratuzumab of | Heavy | 351 | QVQLVQSGAEVKKPGASVKVSCKASGLTIEDYYMHWV |
| SGN-LIV1A | Chain | | RQAPGQGLEWMGWIDPENGDTEYGPKFQGRVTMTRDT |
| | | | SINTAYMELSRLRSDDTAVYYCAVHNAHYGTWFAYWG |
| | | | QGTLVTVSSASTKGPSVFPLAPSSKSTSGGTAALGCLVK |
| | | | DYFPEPVTVSWNSGALTSGVHTFPAVLQSSGLYSLSSVV |
| | | | TVPSSSLGTQTYICNVNHKPSNTKVDKKVEPKSCDKTHT |
| | | | CPPCPAPELLGGPSVFLFPPKPKDTLMISRTPEVTCVVVD |
| | | | VSHEDPEVKFNWYVDGVEVHNAKTKPREEQYNSTYRV |
| | | | VSVLTVLHQDWLNGKEYKCKVSNKALPAPIEKTISKAK |
| | | | GQPREPQVYTLPPSREEMTKNQVSLTCLVKGFYPSDIAV |
| | | | EWESNGQPENNYKTTPPVLDSDGSFFLYSKLTVDKSRW |
| | | | QQGNVFSCSVMHEALHNHYTQKSLSLSPGK |
| | Light | 356 | DVVMTQSPLSLPVTLGQPASISCRSSQSLLHSSGNTYLEY |
| | Chain | | FQQRPGQSPRPLIYKISTRFSGVPDRFSGSGSGTDFTLKIS |
| | | | RVEAEDVGVYYCFQGSHVPYTFGGGTKVEIKRTVAAPS |
| | | | VFIFPPSDEQLKSGTASVVCLLNNFYPREAKVQWKVDN |
| | | | ALQSGNSQESVTEQDSKDSTYSLSSTLTLSKADYEKHKV |
| | | | YACEVTHQGLSSPVTKSFNRGEC |
| Cirmtuzumab | Heavy | 361 | QVQLQESGPGLVKPSQTLSLTCTVSGYAFTAYNIHWVR |
| | Chain | | QAPGQGLEWMGSFDPYDGGSSYNQKFKDRLTISKDTSK |
| | | | NQVVLTMTNMDPVDTATYYCARGWYYFDYWGHGTL |
| | | | VTVSSASTKGPSVFPLAPSSKSTSGGTAALGCLVKDYFP |
| | | | EPVTVSWNSGALTSGVHTFPAVLQSSGLYSLSSVVTVPS |
| | | | SSLGTQTYICNVNHKPSNTKVDKKVEPKSCDKTHTCPPC |
| | | | PAPELLGGPSVFLFPPKPKDTLMISRTPEVTCVVVDVSHE |
| | | | DPEVKFNWYVDGVEVHNAKTKPREEQYNSTYRVVSVL |
| | | | TVLHQDWLNGKEYKCKVSNKALPAPIEKTISKAKGQPR |
| | | | EPQVYTLPPSREEMTKNQVSLTCLVKGFYPSDIAVEWES |
| | | | NGQPENNYKTTPPVLDSDGSFFLYSKLTVDKSRWQQGN |
| | | | VFSCSVMHEALHNHYTQKSLSLSPGK |
| | Light | 366 | DIVMTQTPLSLPVTPGEPASISCRASKSISKYLAWYQQKP |
| | Chain | | GQAPRLLIYSGSTLQSGIPPRFSGSGYGTDFTLTINNIESE |
| | | | DAAYYFCQQHDESPYTFGEGTKVEIKRTVAAPSVFIFPP |
| | | | SDEQLKSGTASVVCLLNNFYPREAKVQWKVDNALQSG |
| | | | NSQESVTEQDSKDSTYSLSSTLTLSKADYEKHKVYACE |
| | | | VTHQGLSSPVTKSFNRGEC |
| Antibody to | Heavy | 371 | QVQLVESGGGVVQPGRSLRLSCTASGFRFRSHGMHWV |
| MAGE-A3 | Chain | | RQAPGKGLEWVAVISYDGNNKLYADSVKGRITISRDNS |
| | | | KNTLFLQMNNVRAEDTAVYYCASPYTSDWQYFQYWG |
| | | | QGTLVIVSSASTKGPSVFPLAPSSKSTSGGTAALGCLVK |
| | | | DYFPEPVTVSWNSGALTSGVHTFPAVLQSSGLYSLSSVV |
| | | | TVPSSSLGTQTYICNVNHKPSNTKVDKKVEPKSCDKTHT |
| | | | CPPCPAPELLGGPSVFLFPPKPKDTLMISRTPEVTCVVVD |
| | | | VSHEDPEVKFNWYVDGVEVHNAKTKPREEQYNSTYRV |
| | | | VSVLTVLHQDWLNGKEYKCKVSNKALPAPIEKTISKAK |
| | | | GQPREPQVYTLPPSREEMTKNQVSLTCLVKGFYPSDIAV |
| | | | EWESNGQPENNYKTTPPVLDSDGSFFLYSKLTVDKSRW |
| | | | QQGNVFSCSVMHEALHNHYTQKSLSLSPGK |
| | Light | 376 | EIVMTQSPATLSVSPGERATFSCRASQNISTTLAWYQQK |
| | Chain | | PGQAPRLLIYDTSTRATGIPARFSGSGSGTEFTLTISSLQS |
| | | | EDLAVYYCQQSNSWPLTFGGGTKVEIKRTVAAPSVFIFP |
| | | | PSDEQLKSGTASVVCLLNNFYPREAKVQWKVDNALQS |
| | | | GNSQESVTEQDSKDSTYSLSSTLTLSKADYEKHKVYAC |
| | | | EVTHQGLSSPVTKSFNRGEC |
| Antibody to NY- | Heavy | 381 | QVQLVQSGGGVVRPGGSLRLSCAASGFSFIDYGMSWVR |
| ESO-1 | Chain | | QVPGKGLEWVAGMNWSGDKKGHAESVKGRFIISRDNA |
| | | | KNTLYLEMSSLRVEDTALYFCARGEYSNRFDPRGRGTL |
| | | | VTVSSASTKGPSVFPLAPSSKSTSGGTAALGCLVKDYFP |
| | | | EPVTVSWNSGALTSGVHTFPAVLQSSGLYSLSSVVTVPS |
| | | | SSLGTQTYICNVNHKPSNTKVDKKVEPKSCDKTHTCPPC |
| | | | PAPELLGGPSVFLFPPKPKDTLMISRTPEVTCVVVDVSHE |
| | | | DPEVKFNWYVDGVEVHNAKTKPREEQYNSTYRVVSVL |
| | | | TVLHQDWLNGKEYKCKVSNKALPAPIEKTISKAKGQPR |
| | | | EPQVYTLPPSREEMTKNQVSLTCLVKGFYPSDIAVEWES |
| | | | NGQPENNYKTTPPVLDSDGSFFLYSKLTVDKSRWQQGN |
| | | | VFSCSVMHEALHNHYTQKSLSLSPGK |
| | Light | 386 | DIVMTQTPLSLPVTLGQPASLSCRSSQSLVFTDGNTYLN |
| | Chain | | WFQQRPGQSPRRLIYKVSSRDPGVPDRFSGTGSGTDFTL |
| | | | EISRVEAEDIGVYYCMQGTHWPPIFGQGTKVEIKRTVAA |
| | | | PSVFIFPPSDEQLKSGTASVVCLLNNFYPREAKVQWKVD |
| | | | NALQSGNSQESVTEQDSKDSTYSLSSTLTLSKADYEKHK |
| | | | VYACEVTHQGLSSPVTKSFNRGEC |
| Trastuzumab | Heavy | 391 | EVQLVESGGGLVQPGGSLRLSCAASGFNIKDTYIHWVR |
| | Chain | | QAPGKGLEWVARIYPTNGYTRYADSVKGRFTISADTSK |
| | | | NTAYLQMNSLRAEDTAVYYCSRWGGDGFYAMDYWG |
| | | | QGTLVTVSSASTKGPSVFPLAPSSKSTSGGTAALGCLVK |
| | | | DYFPEPVTVSWNSGALTSGVHTFPAVLQSSGLYSLSSVV |
| | | | TVPSSSLGTQTYICNVNHKPSNTKVDKKVEPKSCDKTHT |
| | | | CPPCPAPELLGGPSVFLFPPKPKDTLMISRTPEVTCVVVD |
| | | | VSHEDPEVKFNWYVDGVEVHNAKTKPREEQYNSTYRV |
| | | | VSVLTVLHQDWLNGKEYKCKVSNKALPAPIEKTISKAK |
| | | | GQPREPQVYTLPPSREEMTKNQVSLTCLVKGFYPSDIAV |
| | | | EWESNGQPENNYKTTPPVLDSDGSFFLYSKLTVDKSRW |
| | | | QQGNVFSCSVMHEALHNHYTQKSLSLSPGK |
| | Light | 396 | DIQMTQSPSSLSASVGDRVTITCRASQDVNTAVAWYQQ |
| | Chain | | KPGKAPKLLIYSASFLYSGVPSRFSGSRSGTDFTLTISSLQ |
| | | | PEDFATYYCQQHYTTPPTFGQGTKVEIKRTVAAPSVFIFP |
| | | | PSDEQLKSGTASVVCLLNNFYPREAKVQWKVDNALQS |
| | | | GNSQESVTEQDSKDSTYSLSSTLTLSKADYEKHKVYAC |
| | | | EVTHQGLSSPVTKSFNRGEC |

[0150] An antibody construct can comprise an anti-tumor antibody, wherein the antibody comprises: a) a heavy chain sequence having at least 80% sequence identity to an amino acid sequence of SEQ ID NO: 11, and a light chain sequence having at least 80% sequence identity to an amino acid sequence of SEQ ID NO: 16; b) a heavy chain sequence having at least 80% sequence identity to an amino acid sequence of SEQ ID NO: 21, and a light chain sequence having at least 80% sequence identity to an amino acid sequence of SEQ ID NO: 26; c) a heavy chain sequence having at least 80% sequence identity to an amino acid sequence of SEQ ID NO: 31, and a light chain sequence having at least 80% sequence identity to an amino acid sequence of SEQ ID NO: 36; d) a heavy chain sequence having at least 80% sequence identity to an amino acid sequence of SEQ ID NO: 41, and a light chain sequence having at least 80% sequence identity to an amino acid sequence of SEQ ID NO: 46; e) a heavy chain sequence having at least 80% sequence identity to an amino acid sequence of SEQ ID NO: 51, and a light chain sequence having at least 80% sequence identity to an amino acid sequence of SEQ ID NO: 56; f) a heavy chain sequence having at least 80% sequence identity to an amino acid sequence of SEQ ID NO: 61, and a light chain sequence having at least 80% sequence identity to an amino acid sequence of SEQ ID NO: 66; g) a heavy chain sequence having at least 80% sequence identity to an amino acid sequence of SEQ ID NO: 71, and a light chain sequence having at least 80% sequence identity to an amino acid sequence of SEQ ID NO: 76; h) a heavy chain sequence having at least 80% sequence identity to an amino acid sequence of SEQ ID NO: 81, and a light chain sequence having at least 80% sequence identity to an amino acid sequence of SEQ ID NO: 86; i) a heavy chain sequence having at least 80% sequence identity to an amino acid sequence of SEQ ID NO: 91, and a light chain sequence having at least 80% sequence identity to an amino acid sequence of SEQ ID NO: 96; j) a heavy chain sequence having at least 80% sequence identity to an amino acid sequence of SEQ ID NO: 101, and a light chain sequence having at least 80% sequence identity to an amino acid sequence of SEQ ID NO: 106; k) a heavy chain sequence having at least 80% sequence identity to an amino acid sequence of SEQ ID NO: 111, and a light chain sequence having at least 80% sequence identity to an amino acid sequence of SEQ ID NO: 116; 1) a heavy chain sequence having at least 80% sequence identity to an amino acid sequence of SEQ ID NO: 121, and a light chain sequence having at least 80% sequence identity to an amino acid sequence of SEQ ID NO: 126; m) a heavy chain sequence having at least 80% sequence identity to an amino acid sequence of SEQ ID NO: 131, and a light chain sequence having at least 80% sequence identity to an amino acid sequence of SEQ ID NO: 136; n) a heavy chain sequence having at least 80% sequence identity to an amino acid sequence of SEQ ID NO: 141, and a light chain sequence having at least 80% sequence identity to an amino acid sequence of SEQ ID NO: 146; o) a heavy chain sequence having at least 80% sequence identity to an amino acid sequence of SEQ ID NO: 151, and a light chain sequence having at least 80% sequence identity to an amino acid sequence of SEQ ID NO: 156; p) a heavy chain sequence having at least 80% sequence identity to an amino acid sequence of SEQ ID NO: 161, and a light chain sequence having at least 80% sequence identity to an amino acid sequence of SEQ ID NO: 166; q) a heavy chain sequence having at least 80% sequence identity to an amino acid sequence of SEQ ID NO: 171, and a light chain sequence having at least 80% sequence identity to an amino acid sequence of SEQ ID NO: 176; r) a heavy chain sequence having at least 80% sequence identity to an amino acid sequence of SEQ ID NO: 181, and a light chain sequence having at least 80% sequence identity to an amino acid sequence of SEQ ID NO: 186; s) a heavy chain sequence having at least 80% sequence identity to an amino acid sequence of SEQ ID NO: 191, and a light chain sequence having at least 80% sequence identity to an amino acid sequence of SEQ ID NO: 196; t) a heavy chain sequence having at least 80% sequence identity to an amino acid sequence of SEQ ID NO: 201, and a light chain sequence having at least 80% sequence identity to an amino acid sequence of SEQ ID NO: 206; u) a heavy chain sequence having at least 80% sequence identity to an amino acid sequence of SEQ ID NO: 211, and a light chain sequence having at least 80% sequence identity to an amino acid sequence of SEQ ID NO: 216; v) a heavy chain sequence having at least 80% sequence identity to an amino acid sequence of SEQ ID NO: 221, and a light chain sequence having at least 80% sequence identity to an amino acid sequence of SEQ ID NO: 226; w) a heavy chain sequence having at least 80% sequence identity to an amino acid sequence of SEQ ID NO: 231, and a light chain sequence having at least 80% sequence identity to an amino acid sequence of SEQ ID NO: 236; x) a heavy chain sequence having at least 80% sequence identity to an amino acid sequence of SEQ ID NO: 241, and a light chain sequence having at least 80% sequence identity to an amino acid sequence of SEQ ID NO: 246; y) a heavy chain sequence having at least 80% sequence identity to an amino acid sequence of SEQ ID NO: 251, and a light chain sequence having at least 80% sequence identity to an amino acid sequence of SEQ ID NO: 256; z) a heavy chain sequence having at least 80% sequence identity to an amino acid sequence of SEQ ID NO: 261, and a light chain sequence having at least 80% sequence identity to an amino acid sequence of SEQ ID NO: 266; aa) a heavy chain sequence having at least 80% sequence identity to an amino acid sequence of SEQ ID NO: 271, and a light chain sequence having at least 80% sequence identity to an amino acid sequence of SEQ ID NO: 276; bb) a heavy chain sequence having at least 80% sequence identity to an amino acid sequence of SEQ ID NO: 281, and a light chain sequence having at least 80% sequence identity to an amino acid sequence of SEQ ID NO: 286; cc) a heavy chain sequence having at least 80% sequence identity to an amino acid sequence of SEQ ID NO: 291, and a light chain sequence having at least 80% sequence identity to an amino acid sequence of SEQ ID NO: 296; dd) a heavy chain sequence having at least 80% sequence identity to an amino acid sequence of SEQ ID NO: 301, and a light chain sequence having at least 80% sequence identity to an amino acid sequence of SEQ ID NO: 306; ee) a heavy chain sequence having at least 80% sequence identity to an amino acid sequence of SEQ ID NO: 311, and a light chain sequence having at least 80% sequence identity to an amino acid sequence of SEQ ID NO: 316; ff) a heavy chain sequence having at least 80% sequence identity to an amino acid sequence of SEQ ID NO: 321, and a light chain sequence having at least 80% sequence identity to an amino acid sequence of SEQ ID NO: 326; gg) a heavy chain sequence having at least 80% sequence identity to an amino acid sequence of SEQ ID NO: 331, and a light chain sequence having at least 80% sequence identity to an amino acid sequence of SEQ ID NO: 336; hh) a heavy chain sequence having at least 80% sequence identity to an amino acid sequence of SEQ ID NO: 341, and a light chain sequence having at least 80% sequence identity to an amino acid sequence of SEQ ID NO: 346; ii) a heavy chain sequence having at least 80% sequence identity to an amino acid sequence of SEQ ID NO: 351, and a light chain sequence having at least 80% sequence identity to an amino acid sequence of SEQ ID NO: 356; jj) a heavy chain sequence having at least 80% sequence identity to an amino acid sequence of SEQ ID NO: 361, and a light chain sequence having at least 80% sequence identity to an amino acid sequence of SEQ ID NO: 366; kk) a heavy chain sequence having at least 80% sequence identity to an amino acid sequence of SEQ ID NO: 371, and a light chain sequence having at least 80% sequence identity to an amino acid sequence of SEQ ID NO: 376; ll) a heavy chain sequence having at least 80% sequence identity to an amino acid sequence of SEQ ID NO: 381, and a light chain sequence having at least 80% sequence identity to an amino acid sequence of SEQ ID NO: 386; or mm) a heavy chain sequence having at least 80% sequence identity to an amino acid sequence of SEQ ID NO: 391, and a light chain sequence having at least 80% sequence identity to an amino acid sequence of SEQ ID NO: 396.

[0151] An antibody construct can comprise a first binding domain and a second binding domain or a third binding domain that specifically binds to a different antigen than the first binding domain. An antibody construct can comprise a second binding domain or a third binding domain that specifically binds to an antigen on an immune cell. An immune cell can be a T cell, B cell, dendritic cell, macrophage, NK cell, or NKT cell. An immune cell can be an antigen presenting cell, such as a dendritic cell, a macrophage or a monocyte. An antibody construct can comprise a first binding domain and a second binding domain or third binding domain that specifically binds to an antigen on an immune cell, such as an antigen presenting cell. An antigen presenting cell can be a dendritic cell, a monocyte or a macrophage. An antigen presenting cell can be a dendritic cell or a macrophage.

[0152] A second binding domain or a third binding domain can specifically bind to an antigen on an immune cell, wherein the antigen comprises a sequence having at least 80% identity to an amino acid sequence of a group consisting of CD40, DEC-205, CD36 mannose scavenger receptor 1, CLEC9A, DC-SIGN, CLEC12A, BDCA-2, OX40L, 41BBL, CD204, MARCO, CLEC5A, Dectin 1, Dectin 2, CLEC10A, CD206, CD64, CD32A, CD16A, HVEM, CD32B, PD-L1 and CD47. A second binding domain or a third binding domain can specifically bind to an antigen on an immune cell, wherein the antigen is selected from the group consisting of CD40, DEC-205, CD36 mannose scavenger receptor 1, CLEC9A, DC-SIGN, CLEC12A, BDCA-2, OX40L, 41BBL, CD204, MARCO, CLEC5A, Dectin 1, Dectin 2, CLEC10A, CD206, CD64, CD32A, CD16A, HVEM, CD32B, PD-L1 and CD47. A second binding domain or a third binding domain can specifically bind to an antigen on an antigen presenting cell, wherein the antigen comprises a sequence having at least 80% identity to an amino acid sequence selected from the group consisting of CD40, DEC-205, CD36 mannose scavenger receptor 1, CLEC9A, DC-SIGN, CLEC12A, BDCA-2, OX40L, 41BBL, CD204, MARCO, CLEC5A, Dectin 1, Dectin 2, CLEC10A, CD206, CD64, CD32A, CD16A, HVEM, PD-L1, and CD32B. A second binding domain or a third binding domain can specifically bind to an antigen on an antigen presenting cell, wherein the antigen is selected from the group consisting of CD40, DEC-205, CD36 mannose scavenger receptor 1, CLEC9A, DC-SIGN, CLEC12A, BDCA-2, OX40L, 41BBL, CD204, MARCO, CLEC5A, Dectin 1, Dectin 2, CLEC10A, CD206, CD64, CD32A, CD16A, HVEM, PD-L1, and CD32B. TABLE 2 shows exemplary amino acid sequences of antigens on immune cells.

[0153] An antibody construct of a conjugate can comprise a second binding domain or third binding domain comprising one or more CDRs that specifically binds to an antigen on an antigen presenting cell. A second binding domain can comprise at least 80% sequence identity (or at least 90%, 95%, or 100% sequence identity) to a sequence in TABLE 4. A second binding domain or third binding domain can comprise a set of six CDR sequences set forth in TABLE 4.

TABLE 4
APC Antibody CDRs

| | | SEQ ID | |
|---|---|---|---|
| Antibody | Region | NO: | Sequence |
| CP-8709893 | HCDR1 | 3 | GYTFTGYY |
| | HCDR2 | 4 | INPDSGGT |
| | HCDR3 | 5 | ARDQPLGYCTNGVCSYFDY |
| | LCDR1 | 8 | QGIYSW |
| | LCDR2 | 9 | TAS |
| | LCDR3 | 10 | QQANIFPLT |
| SBT-040 | HCDR1 | 3 | GYTFTGYY |
| (G1/G2) | HCDR2 | 4 | INPDSGGT |
| | HCDR3 | 5 | ARDQPLGYCTNGVCSYFDY |
| | LCDR1 | 8 | QGIYSW |
| | LCDR2 | 9 | TAS |
| | LCDR3 | 10 | QQANIFPLT |
| Dacetuzumab | HCDR1 | 406 | GYSFTGYY |
| | HCDR2 | 407 | VIPNAGGT |
| | HCDR3 | 408 | AREGIYW |
| | LCDR1 | 411 | QSLVHSNGNTF |
| | LCDR2 | 412 | TVS |
| | LCDR3 | 413 | SQTTHVPWT |
| Bleselumab | HCDR1 | 416 | GGSISSPGYY |
| | HCDR2 | 417 | IYKSGST |
| | HCDR3 | 418 | TRPVVRYFGWFDP |
| | LCDR1 | 421 | QGISSA |
| | LCDR2 | 422 | DAS |
| | LCDR3 | 423 | QQFNSYPT |
| lucatumumab | HCDR1 | 426 | GFTFSSYG |
| | HCDR2 | 427 | ISYEESNR |
| | HCDR3 | 428 | ARDGGIAAPGPDY |
| | LCDR1 | 431 | QSLLYSNGYNY |
| | LCDR2 | 432 | LGS |
| | LCDR3 | 433 | MQARQTPFT |
| ADC-1013 | HCDR1 | 436 | GFTFSTYG |
| | HCDR2 | 437 | ISGGSSYI |
| | HCDR3 | 438 | ARILRGGSGMDL |
| | LCDR1 | 441 | SSNIGAGYN |
| | LCDR2 | 442 | GNI |
| | LCDR3 | 443 | AAWDKSISGLV |
| APX005 | HCDR1 | 446 | GFSFSSTY |
| | HCDR2 | 447 | IYTGDGTN |
| | HCDR3 | 448 | ARPDITYGFAINFW |
| | LCDR1 | 451 | QSISSR |
| | LCDR2 | 452 | RAS |
| | LCDR3 | 453 | QCTGYGISWP |
| Chi Lob 7/4 | HCDR1 | 456 | GYTFTEYI |
| | HCDR2 | 457 | IIPNNGGT |
| | HCDR3 | 458 | TRREVYGRNYYALDY |
| | LCDR1 | 461 | QGINNY |
| | LCDR2 | 462 | YTS |
| | LCDR3 | 463 | QQYSNLPYT |
| DEC-205 | HCDR1 | 466 | GFTFSNYG |
| variant 1 | HCDR2 | 467 | IWYDGSNK |
| | HCDR3 | 468 | ARDLWGWYFDY |
| | LCDR1 | 471 | QSVSSY |
| | LCDR2 | 472 | DAS |
| | LCDR3 | 473 | QQRRNWPLT |
| DEC-205 | HCDR1 | 476 | GDSFTTYW |
| variant 2 | HCDR2 | 477 | IYPGDSDT |
| | HCDR3 | 478 | TRGDRGVDY |
| | LCDR1 | 481 | QGISRW |
| | LCDR2 | 482 | AAS |
| | LCDR3 | 483 | QQYNSYPRT |
| DC-SIGN | HCDR1 | 552 | QHFWNTPWT |
| variant 1 | HCDR2 | 553 | QQGHTLPYT |
| | HCDR3 | 554 | SNDGYYS |
| | LCDR1 | 555 | RYYLGVD |
| | LCDR2 | 556 | DDSGRFP |
| | LCDR3 | 557 | YGYAVDY |
| DC-SIGN | HCDR1 | 558 | YYGIYVDY |
| variant 2 | HCDR2 | 559 | FLVY |
| | HCDR3 | 560 | NFGILGY |
| | LCDR1 | 561 | YPNALDY |
| | LCDR2 | 562 | GLKSFYAMDH |
| | LCDR3 | 563 | QQGKTLPWT |
| DC-SIGN | HCDR1 | 564 | QQGNTLPPT |
| variant 3 | HCDR2 | 565 | QQHYITPLT |
| | HCDR3 | 566 | QQYGNLPYT |
| | LCDR1 | 567 | QQYYSTPRT |
| | LCDR2 | 568 | GQSYNYPPT |
| | LCDR3 | 569 | WQDTHFPHV |

[0154] An antibody construct of a conjugate can comprise a second binding domain or a third binding domain that specifically binds to CD40. An antibody construct can comprise a second binding domain or a third antigen binding domain that is a CD40 agonist. An antibody construct can comprise a second binding domain or a third binding domain that specifically binds to CD40, wherein the second binding domain or third binding domain comprises at least 80% sequence identity to: a) HCDR1 comprising an amino acid sequence of SEQ ID NO: 3, HCDR2 comprising an amino acid sequence of SEQ ID NO: 4, HCDR3 comprising an amino acid sequence of SEQ ID NO: 5, LCDR1 comprising an amino acid sequence of SEQ ID NO: 8, LCDR2 comprising an amino acid sequence of SEQ ID NO: 9, and LCDR3 comprising an amino acid sequence of SEQ ID NO: 10; b) HCDR1 comprising an amino acid sequence of SEQ ID NO: 406, HCDR2 comprising an amino acid sequence of SEQ ID NO: 407, HCDR3 comprising an amino acid sequence of SEQ ID NO: 408, LCDR1 comprising an amino acid sequence of SEQ ID NO: 411, LCDR2 comprising an amino acid sequence of SEQ ID NO: 412, and LCDR3 comprising an amino acid sequence of SEQ ID NO: 413; c) HCDR1 comprising an amino acid sequence of SEQ ID NO: 416, HCDR2 comprising an amino acid sequence of SEQ ID NO: 417, HCDR3 comprising an amino acid sequence of SEQ ID NO: 418, LCDR1 comprising an amino acid sequence of SEQ ID NO: 421, LCDR2 comprising an amino acid sequence of SEQ ID NO: 422, and LCDR3 comprising an amino acid sequence of SEQ ID NO: 423; d) HCDR1 comprising an amino acid sequence of SEQ ID NO: 426, HCDR2 comprising an amino acid sequence of SEQ ID NO: 427, HCDR3 comprising an amino acid sequence of SEQ ID NO: 428, LCDR1 comprising an amino acid sequence of SEQ ID NO: 431, LCDR2 comprising an amino acid sequence of SEQ ID NO: 432, and LCDR3 comprising an amino acid sequence of SEQ ID NO: 433; e) HCDR1 comprising an amino acid sequence of SEQ ID NO: 436, HCDR2 comprising an amino acid sequence of SEQ ID NO: 437, HCDR3 comprising an amino acid sequence of SEQ ID NO: 438, LCDR1 comprising an amino acid sequence of SEQ ID NO: 441, LCDR2 comprising an amino acid sequence of SEQ ID NO: 442, and LCDR3 comprising an amino acid sequence of SEQ ID NO: 443; f) HCDR1 comprising an amino acid sequence of SEQ ID NO: 446, HCDR2 comprising an amino acid sequence of SEQ ID NO: 447, HCDR3 comprising an amino acid sequence of SEQ ID NO: 448, LCDR1 comprising an amino acid sequence of SEQ ID NO: 451, LCDR2 comprising an amino acid sequence of SEQ ID NO: 452, and LCDR3 comprising an amino acid sequence of SEQ ID NO: 453; or g) HCDR1 comprising an amino acid sequence of SEQ ID NO: 456, HCDR2 comprising an amino acid sequence of SEQ ID NO: 457, HCDR3 comprising an amino acid sequence of SEQ ID NO: 458, LCDR1 comprising an amino acid sequence of SEQ ID NO: 461, LCDR2 comprising an amino acid sequence of SEQ ID NO: 462, and LCDR3 comprising an amino acid sequence of SEQ ID NO: 463.

[0155] A conjugate or antibody construct can comprise a second binding domain or third binding domain that specifically binds to DC-SIGN. A conjugate or antibody construct can comprise a second binding domain or third binding domain that binds DC-SIGN, wherein the second binding domain or third binding domain comprises at least 80% sequence identity to: a) HCDR1 comprising an amino acid sequence of SEQ ID NO: 552, HCDR2 comprising an amino acid sequence of SEQ ID NO: 553, HCDR3 comprising an amino acid sequence of SEQ ID NO: 554, LCDR1 comprising an amino acid sequence of SEQ ID NO: 555, LCDR2 comprising an amino acid sequence of SEQ ID NO: 556, and LCDR3 comprising an amino acid sequence of SEQ ID NO: 557; b) HCDR1 comprising an amino acid sequence of SEQ ID NO: 558, HCDR2 comprising an amino acid sequence of SEQ ID NO: 559, HCDR3 comprising an amino acid sequence of SEQ ID NO: 560, LCDR1 comprising an amino acid sequence of SEQ ID NO: 561, LCDR2 comprising an amino acid sequence of SEQ ID NO: 562, and LCDR3 comprising an amino acid sequence of SEQ ID NO: 563; or c) HCDR1 comprising an amino acid sequence of SEQ ID NO: 564, HCDR2 comprising an amino acid sequence of SEQ ID NO: 565, HCDR3 comprising an amino acid sequence of SEQ ID NO: 566, LCDR1 comprising an amino acid sequence of SEQ ID NO: 567, LCDR2 comprising an amino acid sequence of SEQ ID NO: 568, and LCDR3 comprising an amino acid sequence of SEQ ID NO: 569.

[0156] An antibody construct of a conjugate can comprise a second binding domain or a third binding domain that specifically binds to DEC-205. An antibody construct comprising a second binding domain or a third binding domain that specifically binds to DEC-205 can comprise at least 80% sequence identity to: a) HCDR1 comprising an amino acid sequence of SEQ ID NO: 466, HCDR2 comprising an amino acid sequence of SEQ ID NO: 467, HCDR3 comprising an amino acid sequence of SEQ ID NO: 468, LCDR1 comprising an amino acid sequence of SEQ ID NO: 471, LCDR2 comprising an amino acid sequence of SEQ ID NO: 472, and LCDR3 comprising an amino acid sequence of SEQ ID NO: 473; orb) HCDR1 comprising an amino acid sequence of SEQ ID NO: 476, HCDR2 comprising an amino acid sequence of SEQ ID NO: 477, HCDR3 comprising an amino acid sequence of SEQ ID NO: 478, LCDR1 comprising an amino acid sequence of SEQ ID NO: 481, LCDR2 comprising an amino acid sequence of SEQ ID NO: 482, and LCDR3 comprising an amino acid sequence of SEQ ID NO: 483.

[0157] An antibody construct of a conjugate can comprise a second binding domain or a third binding domain comprising one or more variable domains that specifically bind to an antigen on an antigen presenting cell. An antibody construct can comprise a second binding domain or a third binding domain comprising a light chain variable domain (VL domain). A second binding domain or a third binding domain can comprise a sequence having at least 80% sequence identity (or at least 90%, 95%, or 100% sequence identity) to any VL sequence in TABLE 5. An antibody construct can comprise a second binding domain or a third binding domain comprising a heavy chain variable domain. A second binding domain or a third antigen binding domain can comprise a sequence having at least 80% sequence identity (or at least 90%, 95%, or 100% sequence identity) to any VH sequence in TABLE 5. A second binding domain or a third binding domain can comprise at least 80% sequence identity (or at least 90%, 95%, or 100% sequence identity) to any sequence in TABLE 5. A second binding domain or a third binding domain can comprise a pair of VH and VL sequences set forth in TABLE 5.

TABLE 5
APC Antibody V_{H} sequences and V_{L} sequences

| Antibody | Region | SEQ ID NO: | Sequence |
|---|---|---|---|
| CP-8709893 | V_{H} | 2 | QVQLVQSGAEVKKPGASVKVSCKASGYTFTGYY |
| | | | MHWVRQAPGQGLEWMGWINPDSGGTNYAQKFQ |
| | | | GRVTMTRDTSISTAYMELNRLRSDDTAVYYCAR |
| | | | DQPLGYCTNGVCSYFDYWGQGTLVTVSS |
| | V_{L} | 7 | DIQMTQSPSSVSASVGDRVTITCRASQGIYSWLA |
| | | | WYQQKPGKAPNLLIYTASTLQSGVPSRFSGSGSGT |
| | | | DFTLTISSLQPEDFATYYCQQANIFPLTFGGGTKVE |
| | | | IK |
| SBT-040 | V_{H} | 2 | QVQLVQSGAEVKKPGASVKVSCKASGYTFTGYY |
| | | | MHWVRQAPGQGLEWMGWINPDSGGTNYAQKFQ |
| | | | GRVTMTRDTSISTAYMELNRLRSDDTAVYYCAR |
| | | | DQPLGYCTNGVCSYFDYWGQGTLVTVSS |
| | V_{L} | 7 | DIQMTQSPSSVSASVGDRVTITCRASQGIYSWLA |
| | | | WYQQKPGKAPNLLIYTASTLQSGVPSRFSGSGSGT |
| | | | DFTLTISSLQPEDFATYYCQQANIFPLTFGGGTKVE |
| | | | IK |
| Dacetuzumab | V_{H} | 405 | EVQLVESGGGLVQPGGSLRLSCAASGYSFTGYYI |
| | | | HWVRQAPGKGLEWVARVIPNAGGTSYNQKFKGR |
| | | | FTLSVDNSKNTAYLQMNSLRAEDTAVYYCAREGI |
| | | | YWWGQGTLVTVSS |
| | V_{L} | 410 | DIQMTQSPSSLSASVGDRVTITCRSSQSLVHSNGN |
| | | | TFLHWYQQKPGKAPKLLIYTVSNRFSGVPSRFSGS |
| | | | GSGTDFTLTISSLQPEDFATYFCSQTTHVPWTFGQ |
| | | | GTKVEIK |
| Bleselumab | V_{H} | 415 | QLQLQESGPGLLKPSETLSLTCTVSGGSISSPGYYG |
| | | | GWIRQPPGKGLEWIGSIYKSGSTYHNPSLKSRVTIS |
| | | | VDTSKNQFSLKLSSVTAADTAVYYCTRPVVRYFG |
| | | | WFDPWGQGTLVTVSS |
| | V_{L} | 420 | AIQLTQSPSSLSASVGDRVTITCRASQGISSALAWY |
| | | | QQKPGKAPKLLIYDASNLESGVPSRFSGSGSGTDF |
| | | | TLTISSLQPEDFATYYCQQFNSYPTFGQGTKVEIK |
| Lucatumumab | V_{H} | 425 | QVQLVESGGGVVQPGRSLRLSCAASGFTFSSYGM |
| | | | HWVRQAPGKGLEWVAVISYEESNRYHADSVKGR |
| | | | FTISRDNSKITLYLQMNSLRTEDTAVYYCARDGGI |
| | | | AAPGPDYWGQGTLVTVSS |
| | V_{L} | 430 | DIVMTQSPLSLTVTPGEPASISCRSSQSLLYSNGYN |
| | | | YLDWYLQKPGQSPQVLISLGSNRASGVPDRFSGS |
| | | | GS GTDFTLKISRVEAEDVGVYYCMQARQTPFTFG |
| | | | PGTKVDIR |
| ADC-1013 | V_{H} | 435 | EVQLLESGGGLVQPGGSLRLSCAASGFTFSTYGM |
| | | | HWVRQAPGKGLEWLSYISGGSSYIFYADSVRGRF |
| | | | TISRDNSENALYLQMNSLRAEDTAVYYCARILRG |
| | | | GSGMDLWGQGTLVTVSS |
| | V_{L} | 440 | QSVLTQPPSASGTPGQRVTISCTGSSSNIGAGYNV |
| | | | YWYQQLPGTAPKLLIYGNINRPSGVPDRFSGSKSG |
| | | | TSASLAISGLRSEDEADYYCAAWDKSISGLVFGG |
| | | | GTKLTVL |
| APX005 | V_{H} | 445 | QVQLVESGGGVVQPGRSLRLSCAASGFSFSSTYV |
| | | | CWVRQAPGKGLEWIACIYTGDGTNYSASWAKGR |
| | | | FTISKDSSKNTVYLQMNSLRAEDTAVYFCARPDIT |
| | | | YGFAINFWGPGTLVTVSS |
| | V_{L} | 450 | DIQMTQSPSSLSASVGDRVTIKCQASQSISSRLAW |
| | | | YQQKPGKPPKLLIYRASTLASGVPSRFSGSGSGTD |
| | | | FTLTISSLQPEDVATYYCQCTGYGISWPIGGGTKV |
| | | | EIK |
| Chi Lob 7/4 | V_{H} | 455 | EVQLQQSGPDLVKPGASVKISCKTSGYTFTEYIMH |
| | | | WVKQSHGKSLEWIGGIIPNNGGTSYNQKFKDKAT |
| | | | MTVDKSSSTGYMELRSLTSEDSAVYYCTRREVYG |
| | | | RNYYALDYWGQGTLVTVSS |
| | V_{L} | 460 | DIQMTQTTSSLSASLGDRVTITCSASQGINNYLNW |
| | | | YQQKPDGTVKLLIYYTSSLHSGVPSRFSGSGSGTD |
| | | | YSLTISNLEPEDIATYYCQQYSNLPYTFGGGTKLEI |
| | | | K |
| DEC-205 | V_{H} | 465 | QVQLVESGGGVVQPGRSLRLSCAASGFTFSNYGM |
| variant 1 | | | YWVRQAPGKGLEWVAVIWYDGSNKYYADSVKG |
| | | | RFTISRDNSKNTLYLQMNSLRAEDTAVYYCARDL |
| | | | WGWYFDYWGQGTLVTVSS |
| | V_{L} | 470 | EIVLTQSPATLSLSPGERATLSCRASQSVSSYLAW |
| | | | YQQKPGQAPRLLIYDASNRATGIPARFSGSGSGTD |
| | | | FTLTISSLEPEDFAVYYCQQRRNWPLTFGGGTKVE |
| | | | IK |
| DEC-205 | V_{H} | 475 | EVQLVQSGAEVKKPGESLRISCKGSGDSFTTYWIG |
| variant 2 | | | WVRQMPGKGLEWMGIIYPGDSDTIYSPSFQGQVT |
| | | | ISADKSISTAYLQWSSLKASDTAMYYCTRGDRGV |
| | | | DYWGQGTLVTVSS |
| | V_{L} | 480 | DIQMTQSPSSLSASVGDRVTITCRASQGISRWLAW |
| | | | YQQKPEKAPKSLIYAASSLQSGVPSRFSGSGSGTD |
| | | | FTLTISGLQPEDFATYYCQQYNSYPRTFGQGTKVE |
| | | | IK |
| CD36 mannose | V_{H} | 548 | DIQMTQSPSSLSASVGDRVTITCRASQGISRWLAW |
| Scavenger | | | YQQKPEKAPKSLIYAASSLQSGVPSRFSGSGSGTD |
| Receptor | | | FTLTISGLQPEDFATYYCQQYNSYPRTFGQGTKVE |
| | | | IK |
| | V_{L} | 549 | EVQLVQSGAEVKKPGESLRISCKGSGDSFTTYWIG |
| | | | WVRQMPGKGLEWMGIIYPGDSDTIYSPSFQGQVT |
| | | | ISADKSISTAYLQWSSLKASDTAMYYCTRGDRGV |
| | | | DYWGQGTLVTVSS |
| CLEC9A | V_{H} | 550 | QIVESGGGLVQPKESLKISCTASGFTFSNAAIYWV |
| | | | RQTPGKGLEWVGRIRTRPSKYATDYADSVRGRFT |
| | | | ISRDDSKSMVYLQMDNLRTEDTAMYYCTPRATE |
| | | | DVPFYWGQGVMVTVSS |
| | V_{L} | 551 | DIVMTQTP SSQAVSAGEKVTMNCKSSQSVLYDEN |
| | | | KKNYLAWYQQKSGQSPKLLIYWASTGESGVPDR |
| | | | FIGSGSGTDFTLTISSVQAEDLAVYYCQQYYDFPP |
| | | | TFGGGTK |

[0158] An antibody construct of a conjugate can comprise a second binding domain or a third binding domain that specifically binds to CD40. An antibody construct can comprise a second binding domain or a third binding domain that is a CD40 agonist. An antibody construct can comprise a second binding domain or a third binding domain that specifically binds to CD40, wherein the second binding domain or the third binding domain comprises: a) a VH sequence having at least 80% sequence identity to an amino acid sequence of SEQ ID NO: 2, and a VL sequence having at least 80% sequence identity to an amino acid sequence of SEQ ID NO: 7; b) a VH sequence having at least 80% sequence identity to an amino acid sequence of SEQ ID NO: 405, and a VL sequence having at least 80% sequence identity to an amino acid sequence of SEQ ID NO: 410; c) a VH sequence having at least 80% sequence identity to an amino acid sequence of SEQ ID NO: 415, and a VL sequence having at least 80% sequence identity to an amino acid sequence of SEQ ID NO: 420; d) a VH sequence having at least 80% sequence identity to an amino acid sequence of SEQ ID NO: 425, and a VL sequence having at least 80% sequence identity to an amino acid sequence of SEQ ID NO: 430; e) a VH sequence having at least 80% sequence identity to an amino acid sequence of SEQ ID NO: 435, and a VL sequence having at least 80% sequence identity to an amino acid sequence of SEQ ID NO: 440; f) a VH sequence having at least 80% sequence identity to an amino acid sequence of SEQ ID NO: 445, and a VL sequence having at least 80% sequence identity to an amino acid sequence of SEQ ID NO: 450; g) a VH sequence having at least 80% sequence identity to an amino acid sequence of SEQ ID NO: 455, and a VL sequence having at least 80% sequence identity to an amino acid sequence of SEQ ID NO: 460.

[0159] An antibody construct of a conjugate can comprise a second binding domain or a third binding domain that specifically binds to DEC-205. An antibody construct of a conjugate can comprise a second binding domain or a third binding domain that specifically binds to DEC-205, wherein the second binding domain or the third binding domain comprises: a) a VH sequence having at least 80% sequence identity to an amino acid sequence of SEQ ID NO: 465, and a VL sequence having at least 80% sequence identity to an amino acid sequence of SEQ ID NO: 470; or b) a VH sequence having at least 80% sequence identity to an amino acid sequence of SEQ ID NO: 475, and a VL sequence having at least 80% sequence identity to an amino acid sequence of SEQ ID NO: 480.

[0160] An antibody construct of a conjugate can comprise a second binding domain or a third binding domain that specifically binds to CD36 mannose scavenger receptor 1. An antibody construct can comprise a second binding domain or a third binding domain that specifically binds to CD36 mannose scavenger receptor 1, wherein the second binding domain or the third binding domain comprises a VH sequence having at least 80% sequence identity to an amino acid sequence of SEQ ID NO: 548, and a VL sequence having at least 80% sequence identity to an amino acid sequence of SEQ ID NO: 549.

[0161] An antibody construct of a conjugate can comprise a second binding domain or a third binding domain that specifically binds to CLEC9A. An antibody construct can comprise a second binding domain or a third binding domain that specifically binds to CLEC9A, wherein the second binding domain or the third binding domain comprises a VH sequence having at least 80% sequence identity to an amino acid sequence of SEQ ID NO: 550, and a VL sequence having at least 80% sequence identity to an amino acid sequence of SEQ ID NO: 551.

[0162] An antibody construct can comprise a first binding domain, a second binding domain and an Fc domain, wherein the second binding domain and the Fc domain comprise an antibody that specifically binds to an antigen on an antigen presenting cell. An antibody construct can comprise a first binding domain, second binding domain, a third binding domain and an Fc domain, wherein the second binding domain, the third binding domain and the Fc domain comprise an antibody that specifically binds to an antigen on an antigen presenting cell. An antibody construct can comprise a heavy chain and a light chain that target an antigen expressed by an immune cell such as an antigen presenting cell. An antibody construct can comprise an antibody light chain. An antibody construct can comprise a light chain comprising a sequence having at least 80% sequence identity (or at least 90%, 95%, or 100% sequence identity) to any light chain sequence in TABLE 6. An antibody construct can comprise an antibody heavy chain. An antibody construct can comprise a heavy chain comprising a sequence having at least 80% sequence identity (or at least 90%, 95%, or 100% sequence identity) to any heavy chain sequence in TABLE 6. An antibody construct can comprise at least 80% sequence identity (or at least 90%, 95%, or 100% sequence identity) to any sequence in TABLE 6. An antibody construct can comprise a pair of heavy and light chain sequences set forth in TABLE 6.

TABLE 6
APC Antibody Heavy Chain and Light Chain Sequences

| Antibody | Region | SEQ ID NO: | Sequence |
|---|---|---|---|
| CP-8709893 | Heavy | 1 | QVQLVQSGAEVKKPGASVKVSCKASGYTFTGYYMHWV |
| | Chain | | RQAPGQGLEWMGWINPDSGGTNYAQKFQGRVTMTRDT |
| | | | SISTAYMELNRLRSDDTAVYYCARDQPLGYCTNGVCSYF |
| | | | DYWGQGTLVTVSSASTKGPSVFPLAPCSRSTSESTAALG |
| | | | CLVKDYFPEPVTVSWNSGALTSGVHTFPAVLQSSGLYSL |
| | | | SSVVTVPSSNFGTQTYTCNVDHKPSNTKVDKTVERKCCV |
| | | | ECPPCPAPPVAGPSVFLFPPKPKDTLMISRTPEVTCVVVD |
| | | | VSHEDPEVQFNWYVDGVEVHNAKTKPREEQFNSTFRVV |
| | | | SVLTVVHQDWLNGKEYKCKVSNKGLPAPIEKTISKTKGQ |
| | | | PREPQVYTLPPSREEMTKNQVSLTCLVKGFYPSDIAVEW |
| | | | ESNGQPENNYKTTPPMLDSDGSFFLYSKLTVDKSRWQQ |
| | | | GNVFSCSVMHEALHNHYTQKSLSLSPGK |
| | Light | 6 | DIQMTQSPSSVSASVGDRVTITCRASQGIYSWLAWYQQK |
| | Chain | | PGKAPNLLIYTASTLQSGVPSRFSGSGSGTDFTLTISSLQP |
| | | | EDFATYYCQQANIFPLTFGGGTKVEIKRTVAAPSVFIFPPS |
| | | | DEQLKSGTASVVCLLNNFYPREAKVQWKVDNALQSGNS |
| | | | QESVTEQDSKDSTYSLSSTLTLSKADYEKHKVYACEVTH |
| | | | QGLSSPVTKSFNRGEC |
| SBT-040 | Heavy | 401 | MDWTWRILFLVAAATGAHSQVQLVQSGAEVKKPGASV |
| | Chain | | KVSCKASGYTFTGYYMHWVRQAPGQGLEWMGWINPDS |
| | (IgG1) | | GGTNYAQKFQGRVTMTRDTSISTAYMELNRLRSDDTAV |
| | | | YYCARDQPLGYCTNGVCSYFDYWGQGTLVTVSSASTKG |
| | | | PSVFPLAPCSRSTSESTAALGCLVKDYFPEPVTVSWNSGA |
| | | | LTSGVHTFPAVLQSSGLYSLSSVVTVPSSNFGTQTYTCNV |
| | | | DHKPSNTKVDKTVEPKSCDKTHTCPPCPAPELLGGPSVFL |
| | | | FPPKPKDTLMISRTPEVTCVVVDVSHEDPEVKFNWYVDG |
| | | | VEVHNAKTKPREEQYNSTYRVVSVLTVLHQDWLNGKE |
| | | | YKCKVSNKALPAPIEKTISKAKGQPREPQVYTLPPSREEM |
| | | | TKNQVSLTCLVKGFYPSDIAVEWESNGQPENNYKTTPPV |
| | | | LDSDGSFFLYSKLTVDKSRWQQGNVFSCSVMHEALHNH |
| | | | YTQKSLSLSPGK |
| | Heavy | 402 | MDWTWRILFLVAAATGAHSQVQLVQSGAEVKKPGASV |
| | Chain | | KVSCKASGYTFTGYYMHWVRQAPGQGLEWMGWINPDS |
| | (IgG2) | | GGTNYAQKFQGRVTMTRDTSISTAYMELNRLRSDDTAV |
| | | | YYCARDQPLGYCTNGVCSYFDYWGQGTLVTVSSASTKG |
| | | | PSVFPLAPCSRSTSESTAALGCLVKDYFPEPVTVSWNSGA |
| | | | LTSGVHTFPAVLQSSGLYSLSSVVTVPSSNFGTQTYTCNV |
| | | | DHKPSNTKVDKTVERKCCVECPPCPAPPVAGPSVFLFPPK |
| | | | PKDTLMISRTPEVTCVVVDVSHEDPEVQFNWYVDGVEV |
| | | | HNAKTKPREEQFNSTFRVVSVLTVVHQDWLNGKEYKCK |
| | | | VSNKGLPAPIEKTISKTKGQPREPQVYTLPPSREEMTKNQ |
| | | | VSLTCLVKGFYPSDIAVEWESNGQPENNYKTTPPMLDSD |
| | | | GSFFLYSKLTVDKSRWQQGNVFSCSVMHEALHNHYTQK |
| | | | SLSLSPGK |
| | Light | 403 | MRLPAQLLGLLLLWFPGSRCDIQMTQSPSSVSASVGDRV |
| | Chain | | TITCRASQGIYSWLAWYQQKPGKAPNLLIYTASTLQSGV |
| | | | PSRFSGSGSGTDFTLTISSLQPEDFATYYCQQANIFPLTFG |
| | | | GGTKVEIKRTVAAPSVFIFPPSDEQLKSGTASVVCLLNNF |
| | | | YPREAKVQWKVDNALQSGNSQESVTEQDSKDSTYSLSS |
| | | | TLTLSKADYEKHKVYACEVTHQGLSSPVTKSFNRGEC |
| Dacetuzumab | Heavy | 404 | EVQLVESGGGLVQPGGSLRLSCAASGYSFTGYYIHWVRQ |
| | Chain | | APGKGLEWVARVIPNAGGTSYNQKFKGRFTLSVDNSKN |
| | | | TAYLQMNSLRAEDTAVYYCAREGIYWWGQGTLVTVSS |
| | | | ASTKGPSVFPLAPSSKSTSGGTAALGCLVKDYFPEPVTVS |
| | | | WNSGALTSGVHTFPAVLQSSGLYSLSSVVTVPSSSLGTQT |
| | | | YICNVNHKPSNTKVDKKVEPKSCDKTHTCPPCPAPELLG |
| | | | GPSVFLFPPKPKDTLMISRTPEVTCVVVDVSHEDPEVKFN |
| | | | WYVDGVEVHNAKTKPREEQYNSTYRVVSVLTVLHQDW |
| | | | LNGKEYKCKVSNKALPAPIEKTISKAKGQPREPQVYTLPP |
| | | | SREEMTKNQVSLTCLVKGFYPSDIAVEWESNGQPENNYK |
| | | | TTPPVLDSDGSFFLYSKLTVDKSRWQQGNVFSCSVMHEA |
| | | | LHNHYTQKSLSLSPGK |
| | Light | 409 | DIQMTQSPSSLSASVGDRVTITCRSSQSLVHSNGNTFLHW |
| | Chain | | YQQKPGKAPKLLIYTVSNRFSGVPSRFSGSGSGTDFTLTIS |
| | | | SLQPEDFATYFCSQTTHVPWTFGQGTKVEIKRTVAAPSV |
| | | | FIFPPSDEQLKSGTASVVCLLNNFYPREAKVQWKVDNAL |
| | | | QSGNSQESVTEQDSKDSTYSLSSTLTLSKADYEKHKVYA |
| | | | CEVTHQGLSSPVTKSFNRGEC |
| Bleselumab | Heavy | 414 | QLQLQESGPGLLKPSETLSLTCTVSGGSISSPGYYGGWIR |
| | Chain | | QPPGKGLEWIGSIYKSGSTYHNPSLKSRVTISVDTSKNQF |
| | | | SLKLSSVTAADTAVYYCTRPVVRYFGWFDPWGQGTLVT |
| | | | VSSASTKGPSVFPLAPCSRSTSESTAALGCLVKDYFPEPV |
| | | | TVSWNSGALTSGVHTFPAVLQSSGLYSLSSVVTVPSSSLG |
| | | | TKTYTCNVDHKPSNTKVDKRVESKYGPPCPPCPAPEFEG |
| | | | GPSVFLFPPKPKDTLMISRTPEVTCVVVDVSQEDPEVQFN |
| | | | WYVDGVEVHNAKTKPREEQFNSTYRVVSVLTVLHQDW |
| | | | LNGKEYKCKVSNKGLPSSIEKTISKAKGQPREPQVYTLPP |
| | | | SQEEMTKNQVSLTCLVKGFYPSDIAVEWESNGQPENNY |
| | | | KTTPPVLDSDGSFFLYSRLTVDKSRWQEGNVFSCSVMHE |
| | | | ALHNHYTQKSLSLSLGK |
| | Light | 419 | AIQLTQSPSSLSASVGDRVTITCRASQGISSALAWYQQKP |
| | Chain | | GKAPKLLIYDASNLESGVPSRFSGSGSGTDFTLTISSLQPE |
| | | | DFATYYCQQFNSYPTFGQGTKVEIKRTVAAPSVFIFPPSD |
| | | | EQLKSGTASVVCLLNNFYPREAKVQWKVDNALQSGNSQ |
| | | | ESVTEQDSKDSTYSLSSTLTLSKADYEKHKVYACEVTHQ |
| | | | GLSSPVTKSFNRGEC |
| Lucatumumab | Heavy | 424 | QVQLVESGGGVVQPGRSLRLSCAASGFTFSSYGMHWVR |
| | Chain | | QAPGKGLEWVAVISYEESNRYHADSVKGRFTISRDNSKI |
| | | | TLYLQMNSLRTEDTAVYYCARDGGIAAPGPDYWGQGTL |
| | | | VTVSSASTKGPSVFPLAPASKSTSGGTAALGCLVKDYFPE |
| | | | PVTVSWNSGALTSGVHTFPAVLQSSGLYSLSSVVTVPSSS |
| | | | LGTQTYICNVNHKPSNTKVDKRVEPKSCDKTHTCPPCPA |
| | | | PELLGGPSVFLFPPKPKDTLMISRTPEVTCVVVDVSHEDP |
| | | | EVKFNWYVDGVEVHNAKTKPREEQYNSTYRVVSVLTVL |
| | | | HQDWLNGKEYKCKVSNKALPAPIEKTISKAKGQPREPQV |
| | | | YTLPPSREEMTKNQVSLTCLVKGFYPSDIAVEWESNGQP |
| | | | ENNYKTTPPVLDSDGSFFLYSKLTVDKSRWQQGNVFSCS |
| | | | VMHEALHNHYTQKSLSLSPGK |
| | Light | 429 | DIVMTQSPLSLTVTPGEPASISCRSSQSLLYSNGYNYLDW |
| | Chain | | YLQKPGQSPQVLISLGSNRASGVPDRFSGSGSGTDFTLKIS |
| | | | RVEAEDVGVYYCMQARQTPFTFGPGTKVDIRRTVAAPS |
| | | | VFIFPPSDEQLKSGTASVVCLLNNFYPREAKVQWKVDNA |
| | | | LQSGNSQESVTEQDSKDSTYSLSSTLTLSKADYEKHKVY |
| | | | ACEVTHQGLSSPVTKSFNRGEC |
| ADC-1013 | Heavy | 434 | EVQLLESGGGLVQPGGSLRLSCAASGFTFSTYGMHWVR |
| | Chain | | QAPGKGLEWLSYISGGSSYIFYADSVRGRFTISRDNSENA |
| | | | LYLQMNSLRAEDTAVYYCARILRGGSGMDLWGQGTLV |
| | | | TVSSASTKGPSVFPLAPSSKSTSGGTAALGCLVKDYFPEP |
| | | | VTVSWNSGALTSGVHTFPAVLQSSGLYSLSSWTVPSSSL |
| | | | GTQTYICNVNHKPSNTKVDKKVEPKSCDKTHTCPPCPAP |
| | | | ELLGGPSVFLFPPKPKDTLMISRTPEVTCNAVDVSHEDPE |
| | | | VKFNWYVDGVEVHNAKTKPREEQYNSTYRWSVLTVLH |
| | | | QDWLNGKEYKCKVSNKALPAPIEKTISKAKGQPREPQVY |
| | | | TLPPSRDELTKNQVSLTCLVKGFYPSDIAVEWESNGQPEN |
| | | | NYKTTPPVLDSDGSFFLYSKLTVDKSRWQQGNVFSCSV |
| | | | MHEALHNHYTQKSLSLSPGK |
| | Light | 439 | QSVLTQPPSASGTPGQRVTISCTGSSSNIGAGYNVYWYQ |
| | Chain | | QLPGTAPKLLIYGNINRPSGVPDRFSGSKSGTSASLATSGL |
| | | | RSEDEADYYCAAWDKSISGLVFGGGTKLTVLGQPKAAP |
| | | | SVTLFPPSSEELQANKATLVCLISDFYPGAVTVAWKADSS |
| | | | PVKAGVETTTPSKQSNNKYAASSYLSLTPEQWKSHRSYS |
| | | | CQVTHEGSTVEKTVAPTECS |
| APX005 | Heavy | 444 | QVQLVESGGGVVQPGRSLRLSCAASGFSFSSTYVCWVRQ |
| | Chain | | APGKGLEWIACIYTGDGTNYSASWAKGRFTISKDSSKNT |
| | | | VYLQMNSLRAEDTAVYFCARPDITYGFAINFWGPGTLVT |
| | | | VSSASTKGPSVFPLAPSSKSTSGGTAALGCLVKDYFPEPV |
| | | | TVSWNSGALTSGVHTFPAVLQSSGLYSLSSVVTVPSSSLG |
| | | | TQTYICNVNHKPSNTKVDKKVEPKSCDKTHTCPPCPAPE |
| | | | LLGGPSVFLFPPKPKDTLMISRTPEVTCVVVDVSHEDPEV |
| | | | KFNWYVDGVEVHNAKTKPREEQYNSTYRVVSVLTVLH |
| | | | QDWLNGKEYKCKVSNKALPAPIEKTISKAKGQPREPQVY |
| | | | TLPPSREEMTKNQVSLTCLVKGFYPSDIAVEWESNGQPE |
| | | | NNYKTTPPVLDSDGSFFLYSKLTVDKSRWQQGNVFSCSV |
| | | | MHEALHNHYTQKSLSLSPGK |
| | Light | 449 | DIQMTQSPSSLSASVGDRVTIKCQASQSISSRLAWYQQKP |
| | Chain | | GKPPKLLIYRASTLASGVPSRFSGSGSGTDFTLTISSLQPE |
| | | | DVATYYCQCTGYGISWPIGGGTKVEIKRTVAAPSVFIFPP |
| | | | SDEQLKSGTASVVCLLNNFYPREAKVQWKVDNALQSGN |
| | | | SQESVTEQDSKDSTYSLSSTLTLSKADYEKHKVYACEVT |
| | | | HQGLSSPVTKSFNRGEC |
| Chi Lob 7/4 | Heavy | 454 | EVQLQQSGPDLVKPGASVKISCKTSGYTFTEYIMHWVKQ |
| | Chain | | SHGKSLEWIGGIIPNNGGTSYNQKFKDKATMTVDKSSST |
| | | | GYMELRSLTSEDSAVYYCTRREVYGRNYYALDYWGQG |
| | | | TLVTVSSASTKGPSVFPLAPSSKSTSGGTAALGCLVKDYF |
| | | | PEPVTVSWNSGALTSGVHTFPAVLQSSGLYSLSSVVTVPS |
| | | | SSLGTQTYICNVNHKPSNTKVDKKVEPKSCDKTHTCPPC |
| | | | PAPELLGGPSVFLFPPKPKDTLMISRTPEVTCVVVDVSHE |
| | | | DPEVKFNWYVDGVEVHNAKTKPREEQYNSTYRVVSVLT |
| | | | VLHQDWLNGKEYKCKVSNKALPAPIEKTISKAKGQPREP |
| | | | QVYTLPPSREEMTKNQVSLTCLVKGFYPSDIAVEWESNG |
| | | | QPENNYKTTPPVLDSDGSFFLYSKLTVDKSRWQQGNVFS |
| | | | CSVMHEALHNHYTQKSLSLSPGK |
| | Light | 459 | DIQMTQTTSSLSASLGDRVTITCSASQGINNYLNWYQQK |
| | Chain | | PDGTVKLLIYYTSSLHSGVPSRFSGSGSGTDYSLTISNLEP |
| | | | EDIATYYCQQYSNLPYTFGGGTKLEIKRTVAAPSVFIFPPS |
| | | | DEQLKSGTASVVCLLNNFYPREAKVQWKVDNALQSGNS |
| | | | QESVTEQDSKDSTYSLSSTLTLSKADYEKHKVYACEVTH |
| | | | QGLSSPVTKSFNRGEC |
| DEC-205 | Heavy | 464 | QVQLVESGGGVVQPGRSLRLSCAASGFTFSNYGMYWVR |
| (variant 1) | Chain | | QAPGKGLEWVAVIWYDGSNKYYADSVKGRFTISRDNSK |
| | | | NTLYLQMNSLRAEDTAVYYCARDLWGWYFDYWGQGT |
| | | | LVTVSSASTKGPSVFPLAPSSKSTSGGTAALGCLVKDYFP |
| | | | EPVTVSWNSGALTSGVHTFPAVLQSSGLYSLSSVVTVPSS |
| | | | SLGTQTYICNVNHKPSNTKVDKKVEPKSCDKTHTCPPCP |
| | | | APELLGGPSVFLFPPKPKDTLMISRTPEVTCVVVDVSHED |
| | | | PEVKFNWYVDGVEVHNAKTKPREEQYNSTYRVVSVLTV |
| | | | LHQDWLNGKEYKCKVSNKALPAPIEKTISKAKGQPREPQ |
| | | | VYTLPPSREEMTKNQVSLTCLVKGFYPSDIAVEWESNGQ |
| | | | PENNYKTTPPVLDSDGSFFLYSKLTVDKSRWQQGNVFSC |
| | | | SVMHEALHNHYTQKSLSLSPGK |
| | Light | 469 | EIVLTQSPATLSLSPGERATLSCRASQSVSSYLAWYQQKP |
| | Chain | | GQAPRLLIYDASNRATGIPARFSGSGSGTDFTLTISSLEPE |
| | | | DFAVYYCQQRRNWPLTFGGGTKVEIKRTVAAPSVFIFPPS |
| | | | DEQLKSGTASVVCLLNNFYPREAKVQWKVDNALQSGNS |
| | | | QESVTEQDSKDSTYSLSSTLTLSKADYEKHKVYACEVTH |
| | | | QGLSSPVTKSFNRGEC |
| DEC-205 | Heavy | 474 | EVQLVQSGAEVKKPGESLRISCKGSGDSFTTYWIGWVRQ |
| (variant 2) | Chain | | MPGKGLEWMGIIYPGDSDTIYSPSFQGQVTISADKSISTA |
| | | | YLQWSSLKASDTAMYYCTRGDRGVDYWGQGTLVTVSS |
| | | | ASTKGPSVFPLAPSSKSTSGGTAALGCLVKDYFPEPVTVS |
| | | | WNSGALTSGVHTFPAVLQSSGLYSLSSVVTVPSSSLGTQT |
| | | | YICNVNHKPSNTKVDKKVEPKSCDKTHTCPPCPAPELLG |
| | | | GPSVFLFPPKPKDTLMISRTPEVTCVVVDVSHEDPEVKFN |
| | | | WYVDGVEVHNAKTKPREEQYNSTYRVVSVLTVLHQDW |
| | | | LNGKEYKCKVSNKALPAPIEKTISKAKGQPREPQVYTLPP |
| | | | SREEMTKNQVSLTCLVKGFYPSDIAVEWESNGQPENNYK |
| | | | TTPPVLDSDGSFFLYSKLTVDKSRWQQGNVFSCSVMHEA |
| | | | LHNHYTQKSLSLSPGK |
| | Light | 479 | DIQMTQSPSSLSASVGDRVTITCRASQGISRWLAWYQQK |
| | Chain | | PEKAPKSLIYAASSLQSGVPSRFSGSGSGTDFTLTISGLQP |
| | | | EDFATYYCQQYNSYPRTFGQGTKVEIKRTVAAPSVFIFPP |
| | | | SDEQLKSGTASVVCLLNNFYPREAKVQWKVDNALQSGN |
| | | | SQESVTEQDSKDSTYSLSSTLTLSKADYEKHKVYACEVT |
| | | | HQGLSSPVTKSFNRGEC |
| CLEC12A | Heavy | 484 | QVQLQESGPGLVKPSETLSLTCVVSGGSISSSNWWSWVR |
| | Chain | | QPPGKGLEWIGEIYHSGSPDYNPSLKSRVTISVDKSRNQF |
| | variant | | SLKLSSVTAADTAVYYCAKVSTGGFFDYWGQGTLVTVS |
| | 1 | | SASTKGPSVFPLAPSSKSTSGGTAALGCLVKDYFPEPVTV |
| | | | SWNSGALTSGVHTFPAVLQSSGLYSLSSVVTVPSSSLGTQ |
| | | | TYICNVNHKPSNTKVDKRVEPKSCDKTHTCPPCPAPELL |
| | | | GGPSVFLFPPKPKDTLMISRTPEVTCVVVDVSHEDPEVKF |
| | | | NWYVDGVEVHNAKTKPREEQYNSTYRVVSVLTVLHQD |
| | | | WLNGKEYKCKVSNKALPAPIEKTISKAKGQPREPQVYTL |
| | | | PPSREEMTKNQVSLTCLVKGFYPSDIAVEWESNGQPENN |
| | | | YKTTPPVLDSDGSFFLYSKLTVDKSRWQQGNVFSCSVM |
| | | | HEALHNHYTQKSLSLSPGK |
| | Heavy | 485 | QVQLQESGPGLVKPSETLSLTCVVSGGSISSSNWWSWVR |
| | Chain | | QPPGKGLEWIGEIYHSGSPNYNPSLKSRVTISVDKSKNQF |
| | variant | | SLKLSSVTAADTAVYYCARSSSGGFFDYWGQGTLVTVSS |
| | 2 | | ASTKGPSVFPLAPSSKSTSGGTAALGCLVKDYFPEPVTVS |
| | | | WNSGALTSGVHTFPAVLQSSGLYSLSSVVTVPSSSLGTQT |
| | | | YICNVNHKPSNTKVDKRVEPKSCDKTHTCPPCPAPELLG |
| | | | GPSVFLFPPKPKDTLMISRTPEVTCVVVDVSHEDPEVKFN |
| | | | WYVDGVEVHNAKTKPREEQYNSTYRVVSVLTVLHQDW |
| | | | LNGKEYKCKVSNKALPAPIEKTISKAKGQPREPQVYTLPP |
| | | | SREEMTKNQVSLTCLVKGFYPSDIAVEWESNGQPENNYK |
| | | | TTPPVLDSDGSFFLYSKLTVDKSRWQQGNVFSCSVMHEA |
| | | | LHNHYTQKSLSLSPGK |
| | Heavy | 486 | QVQLQESGPGLVKPSETLSLTCVVSGGSISSSNWWSWVR |
| | Chain | | QPPGKGLEWIGEIYHSGSPNYNPSLKSRVTISVDKSKNQF |
| | variant | | SLKLSSVTAADTAVYYCARQTTAGSFDYWGQGTLVTVS |
| | 3 | | SASTKGPSVFPLAPSSKSTSGGTAALGCLVKDYFPEPVTV |
| | | | SWNSGALTSGVHTFPAVLQSSGLYSLSSVVTVPSSSLGTQ |
| | | | TYICNVNHKPSNTKVDKRVEPKSCDKTHTCPPCPAPELL |
| | | | GGPSVFLFPPKPKDTLMISRTPEVTCVVVDVSHEDPEVKF |
| | | | NWYVDGVEVHNAKTKPREEQYNSTYRVVSVLTVLHQD |
| | | | WLNGKEYKCKVSNKALPAPIEKTISKAKGQPREPQVYTL |
| | | | PPSREEMTKNQVSLTCLVKGFYPSDIAVEWESNGQPENN |
| | | | YKTTPPVLDSDGSFFLYSKLTVDKSRWQQGNVFSCSVM |
| | | | HEALHNHYTQKSLSLSPGK |
| | Light | 487 | DIQMTQSPSSLSASVGDRVTITCRASQSISSYLNWYQQKP |
| | Chain | | GKAPKLLIYAASSLQSGVPSRFSGSGSGTDFTLTISSLQPE |
| | | | DFATYYCQQSYSTPPTFGQGTKVEIKRTVAAPSVFIFPPSD |
| | | | EQLKSGTASVVCLLNNFYPREAKVQWKVDNALQSGNSQ |
| | | | ESVTEQDSKDSTYSLSSTLTLSKADYEKHKVYACEVTHQ |
| | | | GLSSPVTKSFNRGEC |
| BDCA-2 | Heavy | 488 | QVQLVESGGGVVQPGRSLRLSCAASGFTLSSYGMHWVR |
| Variant 1 | Chain | | QAPGKGLEWVAVIWYDGNDKYYADSVKGRFTISRDNSK |
| | | | NTLYLQVNSLRAEDTAVYYCARGTGTPYWYFDLWGRG |
| | | | TLVTVSSASTKGPSVFPLAPSSKSTSGGTAALGCLVKDYF |
| | | | PEPVTVSWNSGALTSGVHTFPAVLQSSGLYSLSSVVTVPS |
| | | | SSLGTQTYICNVNHKPSNTKVDKKVEPKSCDKTHTCPPC |
| | | | PAPELLGGPSVFLFPPKPKDTLMISRTPEVTCVVVDVSHE |
| | | | DPEVKFNWYVDGVEVHNAKTKPREEQYNSTYRVVSVLT |
| | | | VLHQDWLNGKEYKCKVSNKALPAPIEKTISKAKGQPREP |
| | | | QVYTLPPSRDELTKNQVSLTCLVKGFYPSDIAVEWESNG |
| | | | QPENNYKTTPPVLDSDGSFFLYSKLTVDKSRWQQGNVFS |
| | | | CSVMHEALHNHYTQKSLSLSPGK |
| | Light | 489 | EIVLTQSPATLSLSPGERATLSCRASQSVNNYLAWYQQK |
| | Chain | | PGQAPRLLIYDASNRATGIPARFSGSGSGTDFTLTISSLEPE |
| | | | DFAVYYCQQRSTWPPYTFGQGTKLEIKRTVAAPSVFIFPP |
| | | | SDEQLKSGTASVVCLLNNFYPREAKVQWKVDNALQSGN |
| | | | SQESVTEQDSKDSTYSLSSTLTLSKADYEKHKVYACEVT |
| | | | HQGLSSPVTKSFNRGEC |
| BDCA-2 | Heavy | 490 | EVQLVESGGGLVQPGGSLRLSCAASGFTFSNYLMNWVR |
| Variant 2 | Chain | | QAPGKGLEWVANIEQDGSEKYYVDSVKGRFTISRDNAK |
| | | | NSLYLQMNSLRAEDTAVYFCARDGDTAMITFDFWGQGT |
| | | | LVTVSSASTKGPSVFPLAPSSKSTSGGTAALGCLVKDYFP |
| | | | EPVTVSWNSGALTSGVHTFPAVLQSSGLYSLSSVVTVPSS |
| | | | SLGTQTYICNVNHKPSNTKVDKKVEPKSCDKTHTCPPCP |
| | | | APELLGGPSVFLFPPKPKDTLMISRTPEVTCVVVDVSHED |
| | | | PEVKFNWYVDGVEVHNAKTKPREEQYNSTYRVVSVLTV |
| | | | LHQDWLNGKEYKCKVSNKALPAPIEKTISKAKGQPREPQ |
| | | | VYTLPPSRDELTKNQVSLTCLVKGFYPSDIAVEWESNGQ |
| | | | PENNYKTTPPVLDSDGSFFLYSKLTVDKSRWQQGNVFSC |
| | | | SVMHEALHNHYTQKSLSLSPGK |
| | Light | 491 | DIQMTQSPSSVSASVGDRVTITCRASQGIRRWLAWYQQK |
| | Chain | | PGKAPKLLIYAASSLQRGVPSRFSGSGSGTDFTLTISSLQP |
| | | | EDFATYYCQQANSFPWTFGQGTKVEIKRTVAAPSVFIFPP |
| | | | SDEQLKSGTASVVCLLNNFYPREAKVQWKVDNALQSGN |
| | | | SQESVTEQDSKDSTYSLSSTLTLSKADYEKHKVYACEVT |
| | | | HQGLSSPVTKSFNRGEC |
| BDCA-2 | Heavy | 492 | QVQLQESGPGLVKPSQTLSLTCTVSGGSISSGGYYWNWI |
| Variant 3 | Chain | | RQHPGKGLEWIGYIYYSGNTYYNPSLKSRVTISVDTSKN |
| | | | QFSLKLSSVTAADAAVYHCARGYGDYGGGYFDYWGQG |
| | | | TLVTVSSASTKGPSVFPLAPSSKSTSGGTAALGCLVKDYF |
| | | | PEPVTVSWNSGALTSGVHTFPAVLQSSGLYSLSSVVTVPS |
| | | | SSLGTQTYICNVNHKPSNTKVDKKVEPKSCDKTHTCPPC |
| | | | PAPELLGGPSVFLFPPKPKDTLMISRTPEVTCVVVDVSHE |
| | | | DPEVKFNWYVDGVEVHNAKTKPREEQYNSTYRVVSVLT |
| | | | VLHQDWLNGKEYKCKVSNKALPAPIEKTISKAKGQPREP |
| | | | QVYTLPPSRDELTKNQVSLTCLVKGFYPSDIAVEWESNG |
| | | | QPENNYKTTPPVLDSDGSFFLYSKLTVDKSRWQQGNVFS |
| | | | CSVMHEALHNHYTQKSLSLSPGK |
| | Light | 493 | DIQMTQSPSSLSASVGDRVTITCQASQDISNYLNWYQQK |
| | Chain | | PGKAPKFLIYDVSNLETGVPSRFSGSGSGTDFTFTISSLQP |
| | | | EDIATYYCQQYDNLPYTFGQGTKLEIKRTVAAPSVFIFPP |
| | | | SDEQLKSGTASVVCLLNNFYPREAKVQWKVDNALQSGN |
| | | | SQESVTEQDSKDSTYSLSSTLTLSKADYEKHKVYACEVT |
| | | | HQGLSSPVTKSFNRGEC |

[0163] An antibody construct of a conjugate can comprise a heavy chain and a light chain that specifically bind to an antigen expressed by an immune cell such as an antigen presenting cell. An antibody construct can comprise a first binding domain and an Fc domain, wherein the first binding domain and the Fc domain comprise an antibody. An antibody construct can comprise a first binding domain, a second binding domain and an Fc domain, wherein the first binding domain, the second binding domain and the Fc domain comprise an antibody. An antibody construct of a conjugate can comprise an anti-CD40 antibody, the antibody construct comprising: a) a heavy chain sequence having at least 80% sequence identity to an amino acid sequence of SEQ ID NO: 1 and a light chain sequence having at least 80% sequence identity to an amino acid sequence of SEQ ID NO: 6; b) a heavy chain sequence having at least 80% sequence identity to an amino acid sequence of SEQ ID NO: 401 or SEQ ID NO: 402, and a light chain sequence having at least 80% sequence identity to an amino acid sequence of SEQ ID NO: 403; c) a heavy chain sequence having at least 80% sequence identity to an amino acid sequence of SEQ ID NO: 404, and a light chain sequence having at least 80% sequence identity to an amino acid sequence of SEQ ID NO: 409; d) a heavy chain sequence having at least 80% sequence identity to an amino acid sequence of SEQ ID NO: 414, and a light chain sequence having at least 80% sequence identity to an amino acid sequence of SEQ ID NO: 419; e) a heavy chain sequence having at least 80% sequence identity to an amino acid sequence of SEQ ID NO: 424, and a light chain sequence having at least 80% sequence identity to an amino acid sequence of SEQ ID NO: 429; f) a heavy chain sequence having at least 80% sequence identity to an amino acid sequence of SEQ ID NO: 434, and a light chain sequence having at least 80% sequence identity to an amino acid sequence of SEQ ID NO: 439; g) a heavy chain sequence having at least 80% sequence identity to an amino acid sequence of SEQ ID NO: 444, and a light chain sequence having at least 80% sequence identity to an amino acid sequence of SEQ ID NO: 449; or h) a heavy chain sequence having at least 80% sequence identity to an amino acid sequence of SEQ ID NO: 454, and a light chain sequence having at least 80% sequence identity to an amino acid sequence of SEQ ID NO: 459.

[0164] An antibody construct of a conjugate can comprise a first binding domain and an Fc domain, wherein the first binding domain and the Fc domain comprise an antibody. An antibody construct of a conjugate can comprise a first binding domain, a second binding domain and an Fc domain, wherein the first binding domain, the second binding domain and the Fc domain comprise an antibody. An antibody construct of a conjugate can comprise an anti-DEC-205 antibody, the antibody construct comprising: a) a heavy chain sequence having at least 80% sequence identity to an amino acid sequence of SEQ ID NO: 464, and a light chain sequence having at least 80% sequence identity to an amino acid sequence of SEQ ID NO: 469; or b) a heavy chain sequence having at least 80% sequence identity to an amino acid sequence of SEQ ID NO: 474, and a light chain sequence having at least 80% sequence identity to an amino acid sequence of SEQ ID NO: 479.

[0165] An antibody construct of a conjugate can comprise a first binding domain and an Fc domain, wherein the first binding domain and the Fc domain comprise an antibody. An antibody construct of a conjugate can comprise a first binding domain, a second binding domain and an Fc domain, wherein the first binding domain, the second binding domain and the Fc domain comprise an antibody. An antibody construct of a conjugate can comprise an anti-CLEC12A antibody, the antibody construct comprising: a) a heavy chain sequence having at least 80% sequence identity to an amino acid sequence of SEQ ID NO: 484, and a light chain sequence having at least 80% sequence identity to an amino acid sequence of SEQ ID NO: 487; b) a heavy chain sequence having at least 80% sequence identity to an amino acid sequence of SEQ ID NO: 485, and a light chain sequence having at least 80% sequence identity to an amino acid sequence of SEQ ID NO: 487; or c) a heavy chain sequence having at least 80% sequence identity to an amino acid sequence of SEQ ID NO: 486, and a light chain sequence having at least 80% sequence identity to an amino acid sequence of SEQ ID NO: 487.

[0166] An antibody construct of a conjugate can comprise a first binding domain and an Fc domain, wherein the first binding domain and the Fc domain comprise an antibody. An antibody construct of a conjugate can comprise a first binding domain, a second binding domain and an Fc domain, wherein the first binding domain, the second binding domain and the Fc domain comprise an antibody. An antibody construct of a conjugate can comprise an anti-BDCA-2 antibody, the antibody construct comprising: a) a heavy chain sequence having at least 80% sequence identity to an amino acid sequence of SEQ ID NO: 488, and a light chain sequence having at least 80% sequence identity to an amino acid sequence of SEQ ID NO: 489; b) a heavy chain sequence having at least 80% sequence identity to an amino acid sequence of SEQ ID NO: 490, and a light chain sequence having at least 80% sequence identity to an amino acid sequence of SEQ ID NO: 491; or c) a heavy chain sequence having at least 80% sequence identity to an amino acid sequence of SEQ ID NO: 492, and a light chain sequence having at least 80% sequence identity to an amino acid sequence of SEQ ID NO: 493.

### Antibody-ScFv Fusion Protein Products

[0167] An antibody construct of a conjugate can comprise a first binding domain, a second binding domain, and optionally a third binding, and an Fc domain, where one or more of the binding domains are attached to another binding domain or the Fc domain as a fusion protein. In some embodiments, a first binding domain and a second binding domain can be attached to the Fc domain as a fusion protein. In some embodiments, a first binding domain can be attached to the Fc domain at an N-terminal end of the Fc domain, wherein a second binding domain can be attached to the Fc domain at a C-terminal end. In some embodiments, a first binding domain can be attached to the Fc domain at an N-terminal end of the Fc domain, and a second binding domain can be attached to the Fc domain at a C-terminal end via a polypeptide linker ranging from 10 to 25 amino acids comprising the sequence [G4S]n where n=2 to 5. In some embodiments, a first binding domain can be attached to the Fc domain at a C-terminal end of the Fc domain, and a second binding domain can be attached to the Fc domain at an N-terminal end. In some embodiments, a first binding domain can be attached to the Fc domain at a C-terminal end of the Fc domain via a polypeptide linker ranging from 10 to 25 amino acids comprising the sequence [G4S]n where n=2 to 5, and a second binding domain can be attached to the Fc domain at an N-terminal end.

[0168] In some embodiments, a first binding domain, a second binding domain and an Fc domain can comprise an antibody. In some embodiments, a second binding domain and an Fc domain can comprise an antibody and a first binding domain can comprise a single chain variable fragment (scFv). In some embodiments, a second binding domain, a third binding domain and an Fc domain can comprise an antibody and a first binding domain can comprise a single chain variable fragment (scFv).

[0169] A single chain variable fragment typically comprises a heavy chain variable domain and a light chain variable domain of an antibody. In some embodiments, a first binding domain of the fusion protein can be attached to the second binding domain at a heavy chain variable domain of the single chain variable fragment of the first binding domain (HL orientation). In some embodiments, a first binding domain of the fusion protein can be attached to the second binding domain at a light chain variable domain of the single chain variable fragment of the first binding domain (LH orientation). In either orientation, the first binding domain and the second binding domain can be attached via a polypeptide linker varying in length from 15 to 25 amino acids, wherein the linker comprises the sequence [G4S]n where n=3 to 5.

[0170] In other embodiments, a first binding domain and an Fc domain can comprise an antibody and the second binding domain can comprise a single chain variable fragment (scFv). The second binding domain of the fusion protein can be attached to the first binding domain at a heavy chain variable domain of the single chain variable fragment of the first binding domain (HL orientation). Alternatively, the second binding domain of the fusion protein can be attached to the first binding domain at a light chain variable domain of the single chain variable fragment of the first binding domain (LH orientation). In either orientation, the first binding domain or second binding domain can be attached via a polypeptide linker varying in length from 15 to 25 amino acids, wherein the linker comprises the sequence [G4S]n where n=3 to 5.

[0171] In other embodiments, a first binding domain, a second binding domain and an Fc domain can comprise an antibody and a third binding domain can comprise a single chain variable fragment (scFv). The third binding domain of the fusion protein can be attached to the first binding domain at a heavy chain variable domain of the single chain variable fragment of the first binding domain (HL orientation). Alternatively, the third binding domain of the fusion protein can be attached to the first binding domain at a light chain variable domain of the single chain variable fragment of the first binding domain (LH orientation). In either orientation, the third binding domain can be attached via a polypeptide linker varying in length from 15 to 25 amino acids, wherein the linker comprises the sequence [G4S]n where n=3 to 5.

[0172] A conjugate or an antibody construct can comprise a first binding domain and a second binding domain, wherein the second binding domain can be attached to the first binding domain. The conjugate or antibody construct can comprise an antibody comprising a light chain and a heavy chain. The first binding domain can comprise a Fab fragment of the light and heavy chains. The second binding domain can be attached to the light chain at a C-terminus or C-terminal end of the light chain as a fusion protein. The second binding domain can comprise a single chain variable fragment (scFv).

[0173] A conjugate or antibody construct can comprise a first binding domain, a second binding domain, and an Fc domain, wherein the first binding domain and the second binding domain are attached to the Fc domain as a fusion protein. The second binding domain of the fusion protein can specifically target an antigen with at least 80% identity to CD40. The second binding domain of the fusion protein can be a CD40 agonist. The first binding domain of the fusion protein can target a tumor antigen. The conjugate or antibody construct can comprise a fusion protein comprising a heavy chain (HC) attached to a single chain variable fragment.

[0174] In certain embodiments, a first binding domain or a first and second binding domain can specifically bind to a tumor antigen, such as, for example, GD2, GD3, GM2, Le^{y}, sLe, polysialic acid, fucosyl GM1, Tn, STn, BM3, or GloboH. In certain embodiments, a first binding domain or a first and second binding domain can specifically can bind to a tumor antigen having an amino acid sequence having at least 80%, 90%, 95%, 97%, 98%, 99% or 100% identity to the amino acid sequence of CD5, CD19, CD20, CD25, CD37, CD30, CD33, CD45, CAMPATH-1, BCMA, CS-1, PD-L1, B7-H3, B7-DC (PD-L2), HLA-DR, carcinoembryonic antigen (CEA), TAG-72, MUC1, MUC15, MUC16, folate-binding protein, A33, G250, prostate-specific membrane antigen (PSMA), CA-125, CA19-9, epidermal growth factor, HER2, IL-2 receptor, EGFRvIII (de2-7 EGFR), EGFR, fibroblast activation protein (FAP), tenascin, a metalloproteinase, endosialin, vascular endothelial growth factor, αvβ3, WT1, LMP2, HPV E6, HPV E7, p53 nonmutant, NY-ESO-1, GLP-3, MelanA/MART1, Ras mutant, gp100, p53 mutant, PR1, bcr-abl, tyrosinase, survivin, PSA, hTERT, STN1, TNC, a Sarcoma translocation breakpoint fusion protein, EphA2, PAP, ML-IAP, AFP, ERG, NA17, PAX3, ALK, androgen receptor, cyclin B1, MYCN, RhoC, TRP-2, mesothelin (MSLN), PSCA, MAGE A1, MAGE-A3, CYP1B1, PLAV1, BORIS, Tn, ETV6-AML, NY-BR-1, RGS5, SART3, Carbonic anhydrase IX, PAX5, OY-TES1, Sperm protein 17, LCK, MAGE C2, MAGE A4, GAGE, TRAIL1, HMWMAA, AKAP-4, SSX2, XAGE 1, B7H3, Legumain, Tie 3, PAGE4, VEGFR2, MAD-CT-1, PDGFR-B, MAD-CT-2, ROR2, CMET, HER3, EPCAM, CA6, NAPI2B, TROP2, Claudin-6 (CLDN6), Claudin-16 (CLDN16), CLDN18.2, RON, LY6E, FRA, DLL3, PTK7, Uroplakin-1B (UPK1B), LIV1, ROR1, STRA6, TMPRSS3, TMPRSS4, TMEM238, Clorf186, Fos-related antigen 1, VEGFR1, endoglin, VTCN1 (B7-H4), VISTA, or a fragment thereof.

[0175] In certain embodiments, a first binding domain or a first and second binding domain specifically binds to a tumor antigen, such as those selected from CD5, CD25, CD37, CD33, CD45, BCMA, CS-1, PD-L1, B7-H3, B7-DC (PD-L2), HLD-DR, carcinoembryonic antigen (CEA), TAG-72, EpCAM, MUC1, folate-binding protein (FOLR1), A33, G250 (carbonic anhydrase IX), prostate-specific membrane antigen (PSMA), GD2, GD3, GM2, Ley, CA-125, CA19-9 (MUC1 sLe(a)), epidermal growth factor, HER2, IL-2 receptor, EGFRvIII (de2-7 EGFR), fibroblast activation protein (FAP), a tenascin, a metalloproteinase, endosialin, αvβ3, LMP2, EphA2, PAP, AFP, ALK, polysialic acid, TRP-2, fucosyl GM1, mesothelin (MSLN), PSCA, sLe(a), GM3, BORIS, Tn, TF, GloboH, STn, CSPG4, AKAP-4, SSX2, Legumain, Tie 2, Tim 3, VEGFR2, PDGFR-B, ROR2, TRAIL1, MUC16, EGFR, CMET, HER3, MUC1, MUC15, CA6, NAPI2B, TROP2, CLDN18.2, RON, LY6E, FRAlpha, DLL3, PTK7, LIV1, ROR1, CLDN6, GPC3, ADAM12, LRRC15, CDH6, TMEFF2, TMEM238, GPNMB, ALPPL2, UPK1B, UPK2, LAMP-1, LY6K, EphB2, STEAP, ENPP3, CDH3, Nectin4, LYPD3, EFNA4, GPA33, SLITRK6 or HAVCR1.

[0176] In some embodiments, a first binding domain of the fusion protein can target an antigen with at least 80% or 100% identity to the amino acid sequence of HER2, EGFR, CMET, HER3, MUC1, MUC16, EPCAM, MSLN, CA6, NAPI2B, TROP2, CEA, CLDN18.2, EGFRvIII, FAP, EphA2, RON, LY6E, FRA, PSMA, DLL3, PTK7, LIV1, ROR1, MAGE-A3, or NY-ESO-1. In some embodiments, a first binding domain of the fusion protein also can target an antigen with at least 80% or 100% identity to the amino acid sequence of HER2, EGFR, CMET, HER3, MUC1, MUC16, EPCAM, MSLN, CA6, NAPI2B, TROP2, CEA, CLDN18.2, EGFRvIII, FAP, EphA2, RON, LY6E, FRA, PSMA, DLL3, PTK7, LIV1, ROR1, MAGE-A3, NY-ESO-1, LRRC15, GLP-3, CLDN6, CLDN16, UPK1B, VTCN1 (B7-H4), or STRA6. In some embodiments, a first binding domain can target an antigen with at least 80% or 100% identity to the amino acid sequence of TROP2, CEA, MUC16, LRRC15, CLDN6, CLDN16, UPK1B, VTCN1 (B7-H4) or STRA6.

[0177] In certain embodiments, a first or first and second antigen binding domain can specifically bind to an antigen associated with fibrotic or inflammatory disease, such as those selected from Cadherin 11, PDPN, LRRC15, Integrin α4β7, Integrin α2β1, MADCAM, Nephrin, Podocin, IFNAR1, BDCA2, CD30, c-KIT, FAP, CD73, CD38, PDGFRβ, Integrin αvβ1, Integrin αvβ3, Integrin αvβ8, GARP, Endosialin, CTGF, Integrin αvβ6, CD40, PD-1, TIM-3, TNFR2, DEC205, DCIR, CD86, CD45RB, CD45RO, MHC Class II, CD25, LRRC15, MMP14, GPX8, and F2RL2.

[0178] In some embodiments, a first binding domain of a fusion protein binds to a tumor antigen, as set forth above. A second binding domain or a third binding domain of the fusion protein can specifically target an antigen of an immune cell such as an antigen presenting cell (APC). A second binding domain or a third binding domain of the fusion protein can specifically bind to target an antigen with at least 80% identity to CD40. A second binding domain or a third binding domain of the fusion protein can be a CD40 agonist. A second binding domain or a third binding domain of the fusion protein can specifically bind to an antigen with at least 80% identity to DEC-205. A second binding domain or a third binding domain of the fusion protein can specifically bind to an antigen with at least 80% identity to DC-SIGN. A second binding domain or a third binding domain of the fusion protein can specifically bind to an antigen with at least 80% identity to CD36 mannose scavenger receptor. A second binding domain or a third binding domain of the fusion protein can specifically bind to an antigen with at least 80% identity to CLEC12A. A second binding domain or a third binding domain of the fusion protein can specifically bind to an antigen with at least 80% identity to BDCA-2. A second binding domain or a third binding domain of the fusion protein can specifically bind to an antigen with at least 80% or 100% identity to the amino acid sequence of CD40, DEC-205, CD36 mannose scavenger receptor 1, CLEC9A, DC-SIGN, CLEC12A, BDCA-2, OX40L, 41BBL, CD204, MARCO, CLEC5A, Dectin 1, Dectin 2, CLEC10A, CD206, CD64, CD32A, CD16A, HVEM, PD-L1 or CD32B. A first binding domain, or a first and second binding domain of the fusion protein can target a tumor antigen.

[0179] Alternatively, the second binding domain of the fusion protein can specifically bind to a tumor antigen. The second binding domain of the fusion protein can specifically bind to an antigen with at least 80% or 100% identity to the amino acid sequence of HER2, EGFR, CMET, HER3, MUC1, MUC16, EPCAM, MSLN, CA6, NAPI2B, TROP2, CEA, CLDN18.2, EGFRvIII, FAP, EphA2, RON, LY6E, FRA, PSMA, DLL3, PTK7, LIV1, ROR1, MAGE-A3, or NY-ESO-1. The second binding domain of the fusion protein also can specifically bind to an antigen with at least 80% or 100% identity to HER2, EGFR, CMET, HER3, MUC1, MUC16, EPCAM, MSLN, CA6, NAPI2B, TROP2, CEA, CLDN18.2, EGFRvIII, FAP, EphA2, RON, LY6E, FRA, PSMA, DLL3, PTK7, LIV1, ROR1, MAGE-A3, NY-ESO-1, LRRC15, GLP-3, CLDN6, CLDN16, UPK1B, VTCN1 (B7-H4), or STRA6. A first binding domain of the fusion protein can specifically bind to an antigen with at least 80% or 100% identity to the amino acid sequence of CD40, DEC-205, CD36 mannose scavenger receptor 1, CLEC9A, DC-SIGN, CLEC12A, BDCA-2, OX40L, 41BBL, CD204, MARCO, CLEC5A, Dectin 1, Dectin 2, CLEC10A, CD206, CD64, CD32A, CD16A, HVEM, PD-L1 or CD32B.

[0180] In some embodiments, the first binding domain can specifically bind to an antigen with at least 80% or 100% identity to the amino acid sequence of TROP2, CEA, MUC16, LRRC15, CLDN6, CLDN16, UPK1B, VTCN1 (B7-H4) and STRA6 and a second binding domain can specifically bind to an antigen with at least 80% or 100% identity to the amino acid sequence of CD40 or PD-L1.

[0181] In some embodiments, a third binding domain of the fusion protein can specifically bind to an antigen of an immune cell such as an antigen presenting cell (APC). A third binding domain of the fusion protein can specifically bind to an antigen with at least 80% identity to the amino acid sequence of CD40. A third binding domain of the fusion protein can specifically bind to an antigen with at least 80% identity to the amino acid sequence of CD40, DEC-205, CD36 mannose scavenger receptor 1, CLEC9A, DC-SIGN, CLEC12A, BDCA-2, OX40L, 41BBL, CD204, MARCO, CLEC5A, Dectin 1, Dectin 2, CLEC10A, CD206, CD64, CD32A, CD16A, HVEM, PD-L1 or CD32B.

[0182] In some embodiments, a third binding domain can specifically bind to a tumor antigen. In some embodiments, a third binding domain can specifically bind to a tumor antigen, such as, for example, GD2, GD3, GM2, Le^{y}, sLe, polysialic acid, fucosyl GM1, Tn, STn, BM3, or GloboH. In some embodiments, a third binding domain specifically can bind to a tumor antigen having an amino acid sequence having at least 80%, 90%, 95%, 97%, 98%, 99% or 100% identity to the amino acid sequence of CD5, CD19, CD20, CD25, CD37, CD30, CD33, CD45, CAMPATH-1, BCMA, CS-1, PD-L1, B7-H3, B7-DC (PD-L2), HLA-DR, carcinoembryonic antigen (CEA), TAG-72, MUC1, MUC15, MUC16, folate-binding protein, A33, G250, prostate-specific membrane antigen (PSMA), CA-125, CA19-9, epidermal growth factor, HER2, IL-2 receptor, EGFRvIII (de2-7 EGFR), EGFR, fibroblast activation protein (FAP), tenascin, a metalloproteinase, endosialin, vascular endothelial growth factor, αvβ3, WT1, LMP2, HPV E6, HPV E7, p53 nonmutant, NY-ESO-1, GLP-3, MelanA/MART1, Ras mutant, gp100, p53 mutant, PR1, bcr-abl, tyrosinase, survivin, PSA, hTERT, STN1, TNC, a Sarcoma translocation breakpoint fusion protein, EphA2, PAP, ML-IAP, AFP, ERG, NA17, PAX3, ALK, androgen receptor, cyclin B1, MYCN, RhoC, TRP-2, mesothelin (MSLN), PSCA, MAGE A1, MAGE-A3, CYP1B1, PLAV1, BORIS, Tn, ETV6-AML, NY-BR-1, RGS5, SART3, Carbonic anhydrase IX, PAX5, OY-TES1, Sperm protein 17, LCK, MAGE C2, MAGE A4, GAGE, TRAIL1, HMWMAA, AKAP-4, SSX2, XAGE 1, B7H3, Legumain, Tie 3, PAGE4, VEGFR2, MAD-CT-1, PDGFR-B, MAD-CT-2, ROR2, CMET, HER3, EPCAM, CA6, NAPI2B, TROP2, Claudin-6 (CLDN6), Claudin-16 (CLDN16), CLDN18.2, RON, LY6E, FRA, DLL3, PTK7, Uroplakin-1B (UPK1B), LIV1, ROR1, STRA6, TMPRSS3, TMPRSS4, TMEM238, Clorf186, Fos-related antigen 1, VEGFR1, endoglin, VTCN1 (B7-H4), VISTA, or a fragment thereof.

[0183] In some embodiments, a third binding domain of the fusion protein can specifically bind to an antigen with at least 80% or 100% identity to the amino acid sequence of HER2, EGFR, CMET, HER3, MUC1, MUC16, EPCAM, MSLN, CA6, NAPI2B, TROP2, CEA, CLDN18.2, EGFRvIII, FAP, EphA2, RON, LY6E, FRA, PSMA, DLL3, PTK7, LIV1, ROR1, MAGE-A3, or NY-ESO-1. In some embodiments, a third binding domain of the fusion protein can specifically bind to an antigen with at least 80% or 100% identity to the amino acid sequence of HER2, EGFR, CMET, HER3, MUC1, MUC16, EPCAM, MSLN, CA6, NAPI2B, TROP2, CEA, CLDN18.2, EGFRvIII, FAP, EphA2, RON, LY6E, FRA, PSMA, DLL3, PTK7, LIV1, ROR1, MAGE-A3, NY-ESO-1, LRRC15, GLP-3, CLDN6, CLDN16, UPK1B, VTCN1 (B7-H4), or STRA6.

### Other Characteristics of Antibody Constructs

[0184] Conjugates comprising antibody constructs described herein, including those containing the sequences referenced in TABLES 1-6 can have a dissociation constant (Kd) that is less than 10 nM for the antigen of the first binding domain. The conjugates of the antibody constructs described herein, including those containing the sequences referenced in TABLES 1-6 can have a dissociation constant (Kd) that is less than 10 nM for the antigen of the second binding domain. The conjugates of the antibody constructs described herein, including those containing the sequences referenced in TABLES 1-6 can have a dissociation constant (Kd) that is less than 10 nM for the antigen of the third binding domain. The conjugates or antibody constructs can have a dissociation constant (Kd) for the antigen of the first binding domain that is less than 1 nM, less than 100 pM, less than 10 pM, less than 1 pM, or less than 0.1 pM. The conjugates or antibody constructs can have a dissociation constant (Kd) for the antigen of the second binding domain that is less than 1 nM, less than 100 pM, less than 10 pM, less than 1 pM, or less than 0.1 pM. The conjugates or antibody constructs can have a dissociation constant (Kd) for the antigen of the third binding domain that is less than 1 nM, less than 100 pM, less than 10 pM, less than 1 pM, or less than 0.1 pM.

### Fc Domains

[0185] An antibody construct of a conjugate includes an Fc domain. An Fc domain is a structure that can bind to one or more Fc receptors (FcRs). An Fc domain can be from an antibody. An Fc domain can contain an Fc region. An Fc region can be an Fc domain.

[0186] An Fc region of an antibody construct can be of any suitable type, which can be selected from the classes of immunoglobins, IgA, IgD, IgE, IgG, and IgM. Several different classes can be further divided into isotypes, e.g., IgG1, IgG2, IgG3, IgG4, IgA1, and IgA2. The heavy-chain constant regions (Fc) that corresponds to the different classes of immunoglobulins can be α, δ, ε, γ, and μ, respectively. The light chains can be one of either kappa or κ and lambda or λ. The Fc region comprises a number of Fc domains, C_{H}1, C_{H}2, C_{H}3 and C_{H}4, according to the type of antibody.

[0187] In some embodiments, an Fc domain can have an IgG1 isotype. In some embodiments, an Fc domain can have an IgG2 isotype. In some embodiments, an Fc domain can have an IgG3 isotype. In some embodiments, an Fc domain can have an IgG4 isotype. In some embodiments, an Fc domain can have a hybrid isotype comprising constant regions from two or more isotypes.

[0188] An Fc receptor can bind to an Fc domain. Fc domains are portions of the Fc region of an antibody. FcRs can bind to an Fc domain of an antibody. FcRs can bind to an Fc domain of an antibody construct (e.g., an antibody) bound to an antigen. FcRs are organized into classes (e.g., gamma (γ), alpha (α) and epsilon (ε)) based on the class of antibody that the FcR recognizes. The FcαR class can bind to IgA and includes several isoforms, FcαRI (CD89) and FcαμR. The FcγR class can bind to IgG and includes several isoforms, FcγRI (CD64), FcγRIIA (CD32a), FcγRIIB (CD32b), FcγRIIIA (CD16a), and FcγRIIIB (CD16b). An FcγRIIIA (CD16a) can be an FcγRIIIA (CD16a) F158 variant. An FcγRIIIA (CD16a) can be an FcγRIIIA (CD16a) V158 variant. Each FcγR isoform can differ in affinity to the Fc region or Fc domain of an IgG antibody. For example, FcγRI can bind to IgG with greater affinity than FcγRII or FcγRIII. The affinity of a particular FcγR isoform to IgG can be controlled, in part, by a glycan (e.g., oligosacccharaide) at position CH2 84.4 of the IgG antibody. For example, fucose containing CH2 84.4 glycans can reduce IgG affinity for FcγRIIIA In addition, G0 glucans can have increased affinity for FcγRIIIA due to the lack of galactose and terminal GlcNAc moiety.

[0189] Binding of an Fc domain to an FcR can enhance an immune response. FcR-mediated signaling that can result from an Fc region binding to an FcR can lead to the maturation of immune cells. FcR-mediated signaling that can result from an Fc domain binding to an FcR can lead to the maturation of dendritic cells. FcR-mediated signaling that can result from an Fc domain binding to an FcR can lead to antibody dependent cellular cytotoxicity. FcR-mediated signaling that can result from an Fc domain binding to an FcR can lead to more efficient immune cell antigen uptake and processing. FcR-mediated signaling that can result from an Fc region binding to an FcR can lead to more efficient dendritic cell antigen uptake and processing. FcR-mediated signaling that can result from an Fc region binding to an FcR can increase antigen presentation. FcR-mediated signaling that can result from an Fc region binding to an FcR can increase antigen presentation by immune cells. FcR-mediated signaling that can result from an Fc region binding to an FcR can increase antigen presentation by antigen presenting cells. FcR-mediated signaling that can result from an Fc domain binding to an FcR can increase antigen presentation by dendritic cells. FcR-mediated signaling that can result from an Fc domain binding to an FcR can promote the expansion and activation of T cells. FcR-mediated signaling that can result from an Fc domain binding to an FcR can promote the expansion and activation of CD8+ T cells. FcR-mediated signaling that can result from an Fc domain binding to an FcR can influence immune cell regulation of T cell responses. FcR-mediated signaling that can result from an Fc domain binding to an FcR can influence immune cell regulation of T cell responses. FcR-mediated signaling that can result from an Fc domain binding to an FcR can influence dendritic cell regulation of T cell responses. FcR-mediated signaling that can result from an Fc domain binding to an FcR can influence functional polarization of T cells (e.g., polarization can be toward a TH1 cell response).

[0190] The profile of FcRs on a DC can impact the ability of the DC to respond upon stimulation. For example, most DC can express both CD32A and CD32B, which can have opposing effects on IgG-mediated maturation and function of DCs: binding of IgG to CD32A can mature and activate DCs in contrast with CD32B, which can mediate inhibition due to phosphorylation of immunoreceptor tyrosine-based inhibition motif (ITIM), after CD32B binding of IgG. Therefore, the activity of these two receptors can establish a threshold of DC activation. Furthermore, difference in functional avidity of these receptors for IgG can shift their functional balance. Hence, altering the Fc domain binding to FcRs can also shift their functional balance, allowing for manipulation (either enhanced activity or enhanced inhibition) of the DC immune response.

[0191] An Fc domain can have a sequence that has been modified, as compared to a wild type sequence, to alter at least one constant region-mediated biological effector function relative to the corresponding wild type sequence. For example, in some embodiments, an Fc domain can be modified to reduce or increase at least one constant region-mediated biological effector function relative to an unmodified Fc domain, e.g., reduced or increased binding to an Fc receptor (FcR). FcR binding can be reduced or increased by, for example, modifying the immunoglobulin constant region segment of the antibody construct at particular regions involved in (e.g., necessary for or affecting) FcR interactions.

[0192] In some embodiments, an antibody construct described herein can have an Fc domain that is modified to acquire or improve at least one constant region-mediated biological effector function relative to an unmodified Fc domain, e.g., to enhance FcγR interactions. For example, an antibody construct with an Fc domain that binds to FcγRIIA, FcγRIIB and/or FcγRIIIA with greater affinity than the corresponding wild type Fc domain can be produced according to the methods known to the skilled artisan.

[0193] A modification in the amino acid sequence Fc domain can alter the recognition of an FcR for the Fc domain. However, such modifications can still allow for FcR-mediated signaling. A modification can be a substitution of an amino acid at a residue (e.g., wildtype) for a different amino acid at that residue. A modification can permit binding of an FcR to a site on the Fc region that the FcR may not otherwise bind to. A modification can increase binding affinity of an FcR to the Fc domain that the FcR may have reduced affinity for binding. A modification can decrease binding affinity of an FcR to a site on the Fc domain that the FcR may have increased affinity for binding. A modification can increase the subsequent FcR-mediated signaling after Fc binding to an FcR.

[0194] In some embodiments, a modification in the amino acid sequence Fc domain can alter the recognition of an FcR, or multiple FcRs, for the Fc domain. Such a modification(s) can alter the ability of a conjugate to interact with immune cells. Such a modification or series of modifications to an Fc domain, can permit selective binding of an Fc domain to FcRs on immune cells, such as APCs, and selective delivery of the immune-modulatory agent to the immune cells (APCs). For example, modifications to the Fc domain an reduce binding by the FC domain to Fc gamma receptors, but retain the ability of the Fc domain to bind to FcRn.

[0195] An Fc region can have at least one amino acid change as compared to the sequence of the wild-type Fc region. An Fc domain with at least one amino acid change as compared to the sequence of the wild-type Fc domain. An amino acid change in an Fc region can allow the antibody construct or conjugate to bind to at least one Fc receptor with greater affinity compared to a wild-type Fc region. An amino acid change in an Fc domain can allow the antibody to bind to at least one Fc receptor with greater affinity compared to a wild-type Fc domain. An amino acid change in an Fc region can allow the antibody construct or conjugate to bind to at least one Fc receptor with decreased affinity compared to a wild-type Fc region. An amino acid change in an Fc domain can allow the antibody to bind to at least one Fc receptor with decreased affinity compared to a wild-type Fc domain.

[0196] An Fc region can comprise an amino acid sequence having at least one, two, three, four, five, six, seven, eight, nine or ten modifications but not more than 40, 35, 30, 25, 20, 15 or 10 modifications of the amino acid sequence relative to the natural or original amino acid sequence. An Fc domain can comprise an amino acid sequence having at least one, two, three, four, five, six, seven, eight, nine or ten modifications but not more than 40, 35, 30, 25, 20, 15 or 10 modifications of the amino acid sequence relative to the natural or original amino acid sequence.

[0197] An antibody construct can comprise an Fc domain or Fc region comprising a sequence of the IgG1 isoform that has been modified from the wild type IgG1 sequence. A modification can comprise a substitution at one or more one amino acid residues of an Fc domain such as at 5 different amino acid residues including L235V/F243L/R292P/Y300L/P396L (IgG1VLPLL), according to the EU index of Kabat. A modification can comprise a substitution at one or more amino acid residues such as at 2 different amino acid residues of an Fc domain including S239D/I332E (IgG1DE), according to the EU index of Kabat. A modification can comprise a substitution at one or more amino acid residues such as at 3 different amino acid residues of an Fc domain including S298A/E333A/K334A (IgG1AAA), according to the EU index of Kabat.

[0198] In some embodiments, an Fc domain or region can exhibit reduced binding affinity to one or more Fc receptors. In some embodiments, an Fc domain or region can exhibit reduced binding affinity to one or more Fcgamma receptors. In some embodiments, an Fc domain or region can exhibit reduced binding affinity to FcRn receptors. In some embodiments, an Fc domain or region can exhibit reduced binding affinity to Fcgamma and FcRn receptors. In some embodiments, an Fc domain is an Fc null domain or region. As used herein, an “Fc null” refers to a domain that exhibits weak to no binding to any of the Fcgamma receptors. In some embodiments, an Fc null domain or region exhibits a reduction in binding affinity (e.g., increase in Kd) to Fc gamma receptors of at least 1000-fold.

[0199] The Fc domain may have one or more, two or more, three or more, or four or more amino acid substitutions that decrease binding of the Fc domain to an Fc receptor. In certain embodiments, an Fc domain has decreased binding affinity for one or more of FcγRI (CD64), FcγRIIA (CD32), FcγRIIIA (CD16a), FcγRIIIB (CD16b), or any combination thereof. In order to decrease binding affinity of an Fc domain or region to an Fc receptor, the Fc domain or region may comprise one or more amino acid substitutions that reduces the binding affinity of the Fc domain or region to an Fc receptor.

[0200] In certain embodiments, the one or more substitutions comprise any one or more of IgG1 heavy chain mutations corresponding to E233P, L234V, L234A, L235A, L235E, ΔG236, G237A, E318A, K320A, K322A, A327G, A330S, or P331S according to the EU index of Kabat numbering.

[0201] In some embodiments, the Fc domain or region can comprise a sequence of an IgG isoform that has been modified from the wild-type IgG sequence. In some embodiments, the Fc domain or region can comprise a sequence of the IgG1 isoform that has been modified from the wild-type IgG1 sequence. In some embodiments, the modification comprises substitution of one or more amino acids that reduce binding affinity of an IgG Fc domain or region to all Fcγ receptors. A modification can be substitution of E233, L234 and L235, such as E233P/L234V/L235A or E233P/L234V/L235A/ΔG236, according to the EU index of Kabat. A modification can be a substitution of P238, such as P238A, according to the EU index of Kabat. A modification can be a substitution of D265, such as D265A, according to the EU index of Kabat. A modification can be a substitution of N297, such as N297A, according to the EU index of Kabat. A modification can be a substitution of A327, such as A327Q, according to the EU index of Kabat. A modification can be a substitution of P329, such as P239A, according to the EU index of Kabat.

[0202] In some embodiments, an IgG Fc domain or region comprises at least one amino acid substitution that reduces its binding affinity to FcγR1, as compared to a wild-type or reference IgG Fc domain. A modification can comprise a substitution at F241, such as F241A, according to the EU index of Kabat. A modification can comprise a substitution at F243, such as F243A, according to the EU index of Kabat. A modification can comprise a substitution at V264, such as V264A, according to the EU index of Kabat. A modification can comprise a substitution at D265, such as D265A according to the EU index of Kabat.

[0203] In some embodiments, an IgG Fc domain or region comprises at least one amino acid substitution that increases its binding affinity to FcγR1, as compared to a wild-type or reference IgG Fc domain. A modification can comprise a substitution at A327 and P329, such as A327Q/P329A, according to the EU index of Kabat.

[0204] In some embodiments, the modification comprises substitution of one or more amino acids that reduce binding affinity of an IgG Fc domain or region to FcγRII and FcγRIIIA receptors. A modification can be a substitution of D270, such as D270A, according to the EU index of Kabat. A modification can be a substitution of Q295, such as Q295A, according to the EU index of Kabat. A modification can be a substitution of A327, such as A237S, according to the EU index of Kabat.

[0205] In some embodiments, the modification comprises substitution of one or more amino acids that increases binding affinity of an IgG Fc domain or region to FcγRII and FcγRIIIA receptors. A modification can be a substitution of T256, such as T256A, according to the EU index of Kabat. A modification can be a substitution of K290, such as K290A, according to the EU index of Kabat.

[0206] In some embodiments, the modification comprises substitution of one or more amino acids that increases binding affinity of an IgG Fc domain or region to FcγRII receptor. A modification can be a substitution of R255, such as R255A, according to the EU index of Kabat. A modification can be a substitution of E258, such as E258A, according to the EU index of Kabat. A modification can be a substitution of 5267, such as S267A, according to the EU index of Kabat. A modification can be a substitution of E272, such as E272A, according to the EU index of Kabat. A modification can be a substitution of N276, such as N276A, according to the EU index of Kabat. A modification can be a substitution of D280, such as D280A, according to the EU index of Kabat. A modification can be a substitution of H285, such as H285A, according to the EU index of Kabat. A modification can be a substitution of N286, such as N286A, according to the EU index of Kabat. A modification can be a substitution of T307, such as T307A, according to the EU index of Kabat. A modification can be a substitution of L309, such as L309A, according to the EU index of Kabat. A modification can be a substitution of N315, such as N315A, according to the EU index of Kabat. A modification can be a substitution of K326, such as K326A, according to the EU index of Kabat. A modification can be a substitution of P331, such as P331A, according to the EU index of Kabat. A modification can be a substitution of 5337, such as S337A, according to the EU index of Kabat. A modification can be a substitution of A378, such as A378A, according to the EU index of Kabat. A modification can be a substitution of E430, such as E430, according to the EU index of Kabat.

[0207] In some embodiments, the modification comprises substitution of one or more amino acids that increases binding affinity of an IgG Fc domain or region to FcγRII receptor and reduces the binding affinity to FcγRIIIA receptor. A modification can be a substitution of H268, such as H268A, according to the EU index of Kabat. A modification can be a substitution of R301, such as R301A, according to the EU index of Kabat. A modification can be a substitution of K322, such as K322A, according to the EU index of Kabat.

[0208] In some embodiments, the modification comprises substitution of one or more amino acids that decreases binding affinity of an IgG Fc domain or region to FcγRII receptor but does not affect the binding affinity to FcγRIIIA receptor. A modification can be a substitution of R292, such as R292A, according to the EU index of Kabat. A modification can be a substitution of K414, such as K414A, according to the EU index of Kabat.

[0209] In some embodiments, the modification comprises substitution of one or more amino acids that decreases binding affinity of an IgG Fc domain or region to FcγRII receptor and increases the binding affinity to FcγRIIIA receptor. A modification can be a substitution of S298, such as S298A, according to the EU index of Kabat. A modification can be substitution of S239, 1332 and A330, such as S239D/1332E/A330L. A modification can be substitution of S239 and 1332, such as S239D/I332E.

[0210] In some embodiments, the modification comprises substitution of one or more amino acids that decreases binding affinity of an IgG Fc domain or region to FcγRIIIA receptor. A modification can be substitution of F241 and F243, such as F241S/F243S or F241I/F2431, according to the EU index of Kabat.

[0211] In some embodiments, the modification comprises substitution of one or more amino acids that decreases binding affinity of an IgG Fc domain or region to FcγRIIIA receptor and does not affect the binding affinity to FcγRII receptor. A modification can be a substitution of S239, such as S239A, according to the EU index of Kabat. A modification can be a substitution of E269, such as E269A, according to the EU index of Kabat. A modification can be a substitution of E293, such as E293A, according to the EU index of Kabat. A modification can be a substitution of Y296, such as Y296F, according to the EU index of Kabat. A modification can be a substitution of V303, such as V303A, according to the EU index of Kabat. A modification can be a substitution of A327, such as A327G, according to the EU index of Kabat. A modification can be a substitution of K338, such as K338A, according to the EU index of Kabat. A modification can be a substitution of D376, such as D376A, according to the EU index of Kabat.

[0212] In some embodiments, the modification comprises substitution of one or more amino acids that increases binding affinity of an IgG Fc domain or region to FcγRIIIA receptor and does not affect the binding affinity to FcγRII receptor. A modification can be a substitution of E333, such as E333A, according to the EU index of Kabat. A modification can be a substitution of K334, such as K334A, according to the EU index of Kabat. A modification can be a substitution of A339, such as A339T, according to the EU index of Kabat. A modification can be substitution of S239 and 1332, such as S239D/I332E.

[0213] In some embodiments, the modification comprises substitution of one or more amino acids that increases binding affinity of an IgG Fc domain or region to FcγRIIIA receptor. A modification can be substitution of L235, F243, R292, Y300 and P396, such as L235V/F243L/R292P/Y300L/P396L (IgG1VLPLL) according to the EU index of Kabat. A modification can be substitution of S298, E333 and K334, such as S298A/E333A/K334A, according to the EU index of Kabat. A modification can be substitution of K246, such as K246F, according to the EU index of Kabat.

[0214] Other substitutions in an IgG Fc domain that affect its interaction with one or more Fcγ receptors are disclosed in U.S. Pat. Nos. 7,317,091 and 8,969,526 (the disclosures of which are incorporated by reference herein).

[0215] In some embodiments, an IgG Fc domain or region comprises at least one amino acid substitution that reduces the binding affinity to FcRn, as compared to a wild-type or reference IgG Fc domain. A modification can comprise a substitution at H435, such as H435A according to the EU index of Kabat. A modification can comprise a substitution at I253, such as I253A according to the EU index of Kabat. A modification can comprise a substitution at H310, such as H310A according to the EU index of Kabat. A modification can comprise substitutions at I253, H310 and H435, such as I253A/H310A/H435A according to the EU index of Kabat.

[0216] A modification can comprise a substitution of one amino acid residue that increases the binding affinity of an IgG Fc domain for FcRn, relative to a wildtype or reference IgG Fc domain. A modification can comprise a substitution at V308, such as V308P according to the EU index of Kabat. A modification can comprise a substitution at M428, such as M428L according to the EU index of Kabat. A modification can comprise a substitution at N434, such as N434A according to the EU index of Kabat or N434H according to the EU index of Kabat. A modification can comprise substitutions at T250 and M428, such as T250Q and M428L according to the EU index of Kabat. A modification can comprise substitutions at M428 and N434, such as M428L and N434S, N434A or N434H according to the EU index of Kabat. A modification can comprise substitutions at M252, S254 and T256, such as M252Y/S254T/T256E according to the EU index of Kabat. A modification can be a substitution of one or more amino acids selected from P257L, P257N, P2571, V279E, V279Q, V279Y, A281S, E283F, V284E, L306Y, T307V, V308F, Q311V, D376V, and N434H. Other substitutions in an IgG Fc domain that affect its interaction with FcRn are disclosed in U.S. Pat. No. 9,803,023 (the disclosure of which is incorporated by reference herein).

### Immune-Modulatory Agents

[0217] The conjugates described herein further comprise an immune-modulatory agent(s) attached to the antibody construct. In certain embodiments, an immune-modulatory agent can be coupled to the Fc domain of an antibody construct. An immune-modulatory agent can be an immune-stimulatory compound (or molecule) or an immune-suppressive compound (or molecule). An immune-modulatory agent can provide a direct, indirect or adjuvant effect. An immune-stimulatory compound can be a compound or molecule that directly or indirectly stimulates an immune response, such as anti-tumor immune response, after administration. For example, an immune-stimulatory compound can directly stimulate an immune response by causing the release of cytokines by an immune cell expressing a receptor of the immune-stimulatory compound, which results in the activation of immune cells that can, for example, prevent tumor growth or kill tumor cells. As another example, an immune-stimulatory compound can indirectly stimulate an immune response by supressing IL-10 production and secretion by the target cell and/or by supressing the activity of regulatory T cells, resulting in, for example, an increased anti-tumor response by immune cells. An immune-inhibitory compound can be a compound or molecule that directly or indirectly inhibits an immune response, such as an inflammatory response, after administration.

[0218] In certain embodiments, an immune-modulatory agent can target a pattern recognition receptor (PRR). These receptors can be transmembrane or intra-endosomal proteins which can prime activation of the immune system in response to infectious agents such as pathogens. PRRs can recognize pathogen-associated molecular patterns (PAMPs) molecules and damage-associated molecular patterns (DAMPs) molecules. A PRR can be membrane bound. A PRR can be cytosolic. Membrane-bound PRRs include toll-like receptors and C-type lectin receptors, such as mannose receptors and asialoglycoprotein receptors. Cytoplastic PRRs include NOD-like receptors, and RIG-I-like receptors.

[0219] In certain embodiments, an immune-modulatory agent can be a Damage-Associated Molecular Pattern (DAMP) molecule or a Pathogen-Associated Molecular Pattern (PAMP) molecule, such as a DAMP agonist or a PAMP agonist. DAMP molecules and PAMP molecules can be recognized by receptors of the innate immune system, such as Toll-like receptors (TLRs), Nod-like receptors, C-type lectins, and RIG-I-like receptors. In certain embodiments, an immune-modulatory agent is a Toll-like receptor agonist, a STING agonist, or a RIG-I agonist.

[0220] Examples of DAMP molecules can include proteins such as chromatin-associated protein high-mobility group box 1 (HMGB1), S100 molecules of the calcium modulated family of proteins and glycans, such as hyaluronan fragments, and glycan conjugates. DAMP molecules can also be nucleic acids, such as DNA, when released from tumor cells following apoptosis or necrosis. Examples of additional DAMP nucleic acids can include RNA and purine metabolites, such as ATP, adenosine and uric acid, present outside of the nucleus or mitochondria.

[0221] In some embodiments, an immune-modulatory agent can be a cytosolic DNA and bacterial nucleic acids called cyclic dinucleotides, that are recognized by Interferon Regulatory Factor (IRF) or stimulator of interferon genes (STING), which can act a cytosolic DNA sensor. Compounds recognized by Interferon Regulatory Factor (IRF) can play a role in immunoregulation by TLRs and other pattern recognition receptors.

[0222] An immune-modulatory agent can be a toll-like receptor (TLR) agonist. An immune-modulatory agent can be RIG-I-like receptor ligand. An immune-modulatory agent can be a C-type lectin receptor ligand. An immune-modulatory agent can be a NOD-like receptor ligand.

[0223] In some embodiments, an immune-modulatory agent can be a TLR agonist. In some embodiments, an immune-modulatory agent can be selected from a TLR1, TLR2, TLR3, TLR4, TLR5, TLR6, TLR7, TLR8, TLR9, TLR10, TLR11, TLR12 or TLR13 agonist, according the animal species.

[0224] In some embodiments, an immune-stimulatory compound is a ligand of TLR2 selected from the group consisting of: (a) a heat killed bacteria product, preferably HKAL, HKEB, HKHP, HKLM, HKLP, HKLR, HKMF, HKPA, HKPG, or HKSA, HKSP, and (b) a cell-wall components product, preferably LAM, LM, LPS, LIA, LIA, PGN, FSL, Pam2CSK4, Pam3CSK4, or Zymosan.

[0225] In some embodiments, an immune-stimulatory compound is a ligand of TLR3 selected from the group consisting of: rintatolimod, poly-ICLC, RIBOXXON®, Apoxxim, RIBOXXIM®, IPH-33, MCT-465, MCT-475, and ND-1.1.

[0226] In some embodiments, an immune-stimulatory compound is a ligand of TLR4 selected from the group consisting of LPS, MPLA or a pyrimido[5,4-b]indole such as those described in WO 2014/052828 (U of Cal), AZ126 (N-(2-(cyclopentylamino)-2-oxo-1-(pyridin-4-yl)ethyl)-N-(4-methoxyphenyl)-3-methyl-5-phenyl-1H-pyrrole-2-carboxamide) or AZ368 ((E)-3-(4-(2-(cyclopentylamino)-1-(N-(4-isopropylphenyl)-1,5-diphenyl-1H-pyrazole-3-carboxamido)-2-oxoethyl)phenyl)acrylic acid).

[0227] In some embodiments, an immune-stimulatory compound is a ligand of TLR5 selected from the group consisting of: FLA and Flagellin;

[0228] In some embodiments, an immune-stimulatory compound is a ligand of TLR6.

[0229] In certain embodiments, an immune-stimulatory compound is a TLR7 agonist and/or a TLR8 agonist. In certain embodiments, an immune-stimulatory compound is a TLR7 agonist. In certain embodiments, an immune-stimulatory compound is a TLR8 agonist. In some embodiments, an immune-stimulatory compound selectively agonizes TLR7 and not TLR8. In other embodiments, an immune-stimulatory compound selectively agonizes TLR8 and not TLR7.

[0230] In certain embodiments, an immune-stimulatory compound is a TLR7 agonist. In certain embodiments, the TLR7 agonist is selected from an imidazoquinoline, an imidazoquinoline amine, a thiazoquinoline, an aminoquinoline, an aminoquinazoline, a pyrido [3,2-d]pyrimidine-2,4-diamine, pyrimidine-2,4-diamine, 2-aminoimidazole, 1-alkyl-1H-benzimidazol-2-amine, tetrahydropyridopyrimidine, heteroarothiadiazide-2,2-dioxide, a benzonaphthyridine, a guanosine analog, an adenosine analog, a thymidine homopolymer, ssRNA, CpG-A, PolyG10, and PolyG3. In certain embodiments, the TLR7 agonist is selected from an imidazoquinoline, an imidazoquinoline amine, a thiazoquinoline, an aminoquinoline, an aminoquinazoline, a pyrido [3,2-d]pyrimidine-2,4-diamine, pyrimidine-2,4-diamine, 2-aminoimidazole, 1-alkyl-1H-benzimidazol-2-amine, tetrahydropyridopyrimidine, heteroarothiadiazide-2,2-dioxide or a benzonaphthyridine, but is other than a guanosine analog, an adenosine analog, a thymidine homopolymer, ssRNA, CpG-A, PolyG10, and PolyG3. In some embodiments, a TLR7 agonist is a non-naturally occurring compound. Examples of TLR7 modulators include GS-9620, GSK-2245035, imiquimod, resiquimod, DSR-6434, DSP-3025, IMO-4200, MCT-465, MEDI-9197, 3M-051, SB-9922, 3M-052, Limtop, TMX-30X, TMX-202, RG-7863, RG-7795, and the compounds disclosed in US20160168164 (Janssen), US 20150299194 (Roche), US20110098248 (Gilead Sciences), US20100143301 (Gilead Sciences), and US20090047249 (Gilead Sciences). In some embodiments, a TLR7 agonist has an EC50 value of 500 nM or less by PBMC assay measuring TNFalpha or IFNalpha production. In some embodiments, a TLR7 agonist has an EC50 value of 100 nM or less by PBMC assay measuring TNFalpha or IFNalpha production. In some embodiments, a TLR7 agonist has an EC50 value of 50 nM or less by PBMC assay measuring TNFalpha or IFNalpha production. In some embodiments, a TLR7 agonist has an EC50 value of 10 nM or less by PBMC assay measuring TNFalpha or IFNalpha production.

[0231] In certain embodiments, an immune-stimulatory compound is a TLR8 agonist. In certain embodiments, the TLR8 agonist is selected from the group consisting of a benzazepine, an imidazoquinoline, a thiazoloquinoline, an aminoquinoline, an aminoquinazoline, a pyrido [3,2-d]pyrimidine-2,4-diamine, pyrimidine-2,4-diamine, 2-aminoimidazole, 1-alkyl-1H-benzimidazol-2-amine, tetrahydropyridopyrimidine or a ssRNA. In certain embodiments, a TLR8 agonist is selected from the group consisting of a benzazepine, an imidazoquinoline, a thiazoloquinoline, an aminoquinoline, an aminoquinazoline, a pyrido [3,2-d]pyrimidine-2,4-diamine, pyrimidine-2,4-diamine, 2-aminoimidazole, 1-alkyl-1H-benzimidazol-2-amine, tetrahydropyridopyrimidine and is other a ssRNA. In some embodiments, an immune-modulatory agent is a TLR8 agonist, other than a naturally occurring TLR8 agonist or a benzazepine agonist of TLR8. In some embodiments, a TLR8 agonist is a non-naturally occurring compound. Examples of TLR8 agonists include motolimod, resiquimod, 3M-051, 3M-052, MCT-465, IMO-4200, VTX-763, VTX-1463, and the compounds disclosed in US20180086755 (Gilead), WO2017216054 (Roche), WO2017190669 (Shanghai De Novo Pharmatech), WO2017202704 (Roche), WO2017202703 (Roche), WO20170071944 (Gilead), US20140045849 (Janssen), US20140073642 (Janssen), WO2014056953 (Janssen), WO2014076221 (Janssen), WO2014128189 (Janssen), US20140350031 (Janssen), WO2014023813 (Janssen), US20080234251 (Array Biopharma), US20080306050 (Array Biopharma), US20100029585 (Ventirx Pharma), US20110092485 (Ventirx Pharma), US20110118235 (Ventirx Pharma), US20120082658 (Ventirx Pharma), US20120219615 (Ventirx Pharma), US20140066432 (Ventirx Pharma), US20140088085 (Ventirx Pharma), US20140275167 (Novira Therapeutics), and US20130251673 (Novira Therapeutics

[0232] In some embodiments, the immune-stimulatory compound is a compound of Formula (IA), (IB), or (IC):

[chemical structure]

or a pharmaceutically acceptable salt thereof:

[0233] L¹ is selected from —N(R¹⁰)C(O)—*, —S(O)₂N(R¹⁰)—*, —CR¹⁰2N(R¹⁰)C(O)—*and —X²—C₁₋₆ alkylene-X²—C₁₋₆ alkylene-, wherein * represents where L¹ is bound to R³;

[0234] L² is —C(O)—;

[0235] X² at each occurrence is independently selected from —O—, —S—, —N(R¹⁰)—, —C(O)—, —C(O)O—, —OC(O)—, —OC(O)O—, —C(O)N(R¹⁰)—, —C(O)N(R¹⁰)C(O)—, —C(O)N(R¹⁰)C(O)N(R¹⁰)—, —N(R¹⁰)C(O)—, —N(R¹⁰)C(O)N(R¹⁰)—, and —N(R¹⁰)C(O)O—;

[0236] R¹ and R² are independently selected from hydrogen; and C₁₋₁₀ alkyl optionally substituted with one or more substituents selected from halogen, —OR¹⁰, —SR¹⁰, —C(O)N(R¹⁰)₂, —N(R¹⁰)₂, —NO₂, ═O, ═S, ═N(R¹⁰), and —CN;

[0237] R³ is selected from an optionally substituted phenyl, heteroaryl and 9- or 10-membered bicyclic carbocycle wherein substituents are independently selected at each occurrence from: halogen, —OR¹⁰, —SR¹⁰, —C(O)N(R¹⁰)₂, —NO₂, ═O, ═S, ═N(R¹⁰), and —CN; C₁₋₁₀ alkyl optionally substituted at each occurrence with one or more substituents selected from halogen, —OR¹⁰, —SR¹⁰, —N(R¹⁰)₂, —C(O)R¹⁰, —NO₂, ═O, ═S, ═N(R¹⁰), —CN, C₃₋₁₂ carbocycle, and 3- to 12-membered heterocycle;

[0238] R⁴ is selected from: —OR¹⁰, —N(R¹⁰)₂, —C(O)N(R¹⁰)₂, —C(O)R¹⁰, —C(O)OR¹⁰, —S(O)R¹⁰, and —S(O)₂R¹⁰; C₁₋₁₀ alkyl optionally substituted at each occurrence with one or more substituents selected from halogen, —OR¹⁰, —SR¹⁰, —N(R¹⁰)₂, —C(O)R¹⁰, —NO₂, ═O, ═S, ═N(R¹⁰), —CN, C₃₋₁₂ carbocycle, and 3- to 12-membered heterocycle;

[0239] R¹⁰ is independently selected at each occurrence from: hydrogen, —NH₂, —C(O)OCH₂C₆H; and C₁₋₁₀ alkyl, C₂₋₁₀ alkenyl, C₂₋₁₀ alkynyl, C₃₋₁₂ carbocycle, and 3- to 12-membered heterocycle, each of which is independently optionally substituted at each occurrence with one or more substituents selected from halogen, —CN, —NO₂, —NH₂, ═O, ═S, —C(O)OCH₂C₆H₅, —NHC(O)OCH₂C₆H₅, C₁₋₁₀ alkyl, C₂₋₁₀ alkenyl, C₂₋₁₀ alkynyl, C₃₋₁₂ carbocycle, 3- to 12-membered heterocycle, and haloalkyl; and wherein any substitutable carbon on the benzazepine core of Formula (IA) is optionally substituted with one or more R¹², wherein R¹² is independently selected at each occurrence from halogen, —OR¹⁰, —SR¹⁰, —N(R¹⁰)₂, —C(O)R¹⁰, —C(O)N(R¹⁰)₂, —N(R¹⁰)C(O)R¹⁰, —C(O)OR¹⁰, —OC(O)R¹⁰, —S(O)R¹⁰, —S(O)₂R¹⁰, —NO₂, ═O, ═S, ═N(R¹⁰), and —CN; and C₁₋₁₀ alkyl optionally substituted with one or more substituents independently selected from halogen, —OR¹⁰, —SR¹⁰, —N(R¹⁰)₂, —C(O)R¹⁰, —C(O)N(R¹⁰)₂, —N(R¹⁰)C(O)R¹⁰, —C(O)OR¹⁰, —OC(O)R¹⁰, —S(O)R¹⁰, —S(O)₂R¹⁰, —NO₂, ═O, ═S, ═N(R¹⁰), —CN, C₃₋₁₀ carbocycle and 3- to 10-membered heterocycle; or for a compound of Formula (IB) or (IC), R²⁰, R²¹, R²², and R²³ are independently selected from hydrogen, halogen, —OR¹⁰, —SR¹⁰, —N(R¹⁰)₂, —S(O)R¹⁰, —S(O)₂R¹⁰, —C(O)R¹⁰, —C(O)OR¹⁰, —OC(O)R¹⁰, —NO₂, ═O, ═S, ═N(R¹⁰), —CN, C₁₋₁₀ alkyl, C₂₋₁₀ alkenyl, and C₂₋₁₀ alkynyl, such as R²⁰, R²¹, R²², and R²³ are each hydrogen; and R²⁴, and R²⁵ are independently selected from hydrogen, halogen, —OR¹⁰, —SR¹⁰, —N(R¹⁰)₂, —S(O)R¹⁰, —S(O)₂R¹⁰, —C(O)R¹⁰, —C(O)OR¹⁰, —OC(O)R¹⁰, —NO₂, ═O, ═S, ═N(R¹⁰), —CN, C₁₋₁₀ alkyl, C₂₋₁₀ alkenyl, and C₂₋₁₀ alkynyl, such as R²⁴ and R²⁵ are each hydrogen.

[0240] In some embodiments, the immune-stimulatory compound is a compound of Formula (IIA), (IIB) or (IIC):

[chemical structure]

or a pharmaceutically acceptable salt thereof, wherein:

[0241] L¹⁰ is selected from —C(O)N(R¹⁰)—* and —C(O)—, wherein * represents where Lo is bound to R⁵;

[0242] L² is —C(O)—;

[0243] R¹ and R² are each hydrogen;

[0244] R⁴ is selected from: —OR¹⁰, —N(R¹⁰)₂, —C(O)N(R¹⁰)₂, —C(O)R¹⁰, —C(O)OR¹⁰, —S(O)R¹⁰, and —S(O)₂R¹⁰;

[0245] R⁵ is selected from optionally substituted fused 5-5, fused 5-6, and fused 6-6 bicyclic heterocycle wherein substituents are independently selected at each occurrence from: halogen, —OR¹⁰, —SR¹⁰, —C(O)N(R¹⁰)₂, —N(R¹⁰)C(O)R¹⁰, —N(R¹⁰)C(O)N(R¹⁰)₂, —N(R¹⁰)₂, —C(O)R¹⁰, —C(O)OR¹⁰, —OC(O)R¹⁰, —NO₂, ═O, ═S, ═N(R¹⁰), and —CN; C₁₋₁₀ alkyl, C₂₋₁₀ alkenyl, C₂₋₁₀ alkynyl, each of which is independently optionally substituted at each occurrence with one or more substituents selected from halogen, —OR¹⁰, —SR¹⁰, —C(O)N(R¹⁰)₂, —N(R¹⁰)C(O)R¹⁰, —N(R¹⁰)C(O)N(R¹⁰)₂, —N(R¹⁰)₂, —C(O)R¹⁰, —C(O)OR¹⁰, —OC(O)R¹⁰, —NO₂, ═O, ═S, ═N(R¹⁰), —CN, C₃₋₁₂ carbocycle, and 3- to 12-membered heterocycle; and C₃₋₁₂ carbocycle, and 3- to 12-membered heterocycle each of which is optionally substituted with one or more substituents independently selected from halogen, —OR¹⁰, —SR¹⁰, —C(O)N(R¹⁰)₂, —N(R¹⁰)C(O)R¹⁰, —N(R¹⁰)C(O)N(R¹⁰)₂, —N(R¹⁰)₂, —C(O)R¹⁰, —C(O)OR¹⁰, —OC(O)R¹⁰, —NO₂, ═O, ═S, ═N(R¹⁰), —CN, C₁₋₆ alkyl, C₂₋₆ alkenyl, and C₂₋₆ alkynyl;

[0246] R¹⁰ is independently selected at each occurrence from hydrogen, —NH₂, —C(O)OCH₂C₆H₅; and C₁₋₁₀ alkyl optionally substituted with one or more substituents independently selected from halogen, —OH, —CN, —NO₂, —NH₂, ═O, ═S, —C(O)OCH₂C₆H₅, —NHC(O)OCH₂C₆H₅, C₃₋₁₂ carbocycle, and 3- to 12-membered heterocycle; and

[0247] wherein any substitutable carbon on the benzazepine core of Formula (IIA) is optionally substituted by a substituent independently selected from R¹², wherein R¹² is independently selected at each occurrence from halogen, —OR¹⁰, —SR¹⁰, —N(R¹⁰)₂, —C(O)R¹⁰, —C(O)N(R¹⁰)₂, —N(R¹⁰)C(O)R¹⁰, —C(O)OR¹⁰, —OC(O)R¹⁰, —S(O)R¹⁰, —S(O)₂R¹⁰, —NO₂, ═O, ═S, ═N(R¹⁰), and —CN; and C₁₋₁₀ alkyl optionally substituted with one or more substituents independently selected from halogen, —OR¹⁰, —SR¹⁰, —N(R¹⁰)₂, —C(O)R¹⁰, —C(O)N(R¹⁰)₂, —N(R¹⁰)C(O)R¹⁰, —C(O)OR¹⁰, —OC(O)R¹⁰, —S(O)R¹⁰, —S(O)₂R¹⁰, —NO₂, ═O, ═S, ═N(R¹⁰), —CN, C₃₋₁₀ carbocycle and 3- to 10-membered heterocycle, or

[0248] for a compound of Formula (IIB) or (IIC), R²⁰, R²¹, R²², and R²³ are independently selected from hydrogen, halogen, —OR¹⁰, —SR¹⁰, —N(R¹⁰)₂, —S(O)R¹⁰, —S(O)₂R′, —C(O)R¹⁰, —C(O)OR¹⁰, —OC(O)R¹⁰, —NO₂, ═O, ═S, ═N(R¹⁰), —CN, C₁₋₁₀ alkyl, C₂₋₁₀ alkenyl, and C₂₋₁₀ alkynyl, such as R²⁰, R²¹, R²², and R²³ are each hydrogen; and

[0249] R²⁴, and R²⁵ are independently selected from hydrogen, halogen, —OR¹⁰, —SR¹⁰, —N(R¹⁰)₂, —S(O)R¹⁰, —S(O)₂R¹⁰, —C(O)R¹⁰, —C(O)OR¹⁰, —OC(O)R¹⁰, —NO₂, ═O, ═S, ═N(R¹⁰), —CN, C₁₋₁₀ alkyl, C₂₋₁₀ alkenyl, and C₂₋₁₀ alkynyl, such as R²⁴ and R²⁵ are each hydrogen.

[0250] In some embodiments, the immune-stimulatory compound is a compound of Formula (IIB) or (IIC):

[chemical structure]

or a pharmaceutically acceptable salt thereof, wherein:

[0251] L¹⁰ is selected from —C(O)N(R¹⁰)—*, such as —C(O)NH—*, wherein * represents where L¹⁰ is bound to R⁵;

[0252] L² is —C(O)—;

[0253] R¹ and R² are each hydrogen;

[0254] R⁴ is selected from: —OR¹⁰, —N(R¹⁰)₂, —C(O)N(R¹⁰)₂, —C(O)R¹⁰, —C(O)OR¹⁰, —S(O)R¹⁰, and —S(O)₂R¹⁰, such as R⁴ is —N(R¹⁰)₂;

[0255] R⁵ is selected from optionally substituted optionally substituted fused 5-5, fused 5-6, and fused 6-6 bicyclic heterocycle, such as R⁵ is selected from a tetrahydroquinoline, tetrahydroisoquinaline, dihydroindene, wherein substituents on R5 are independently selected at each occurrence from: halogen, —OR¹⁰, —SR¹⁰, —C(O)N(R¹⁰)₂, —N(R¹⁰)C(O)R¹⁰, —N(R¹⁰)C(O)N(R¹⁰)₂, —N(R¹⁰)₂, —C(O)R¹⁰, —C(O)OR¹⁰, —OC(O)R¹⁰, —NO₂, ═O, ═S, ═N(R¹⁰), and —CN; and C₁₋₁₀ alkyl optionally substituted at each occurrence with one or more substituents selected from halogen, —OR¹⁰, —SR¹⁰, —C(O)N(R¹⁰)₂, —N(R¹⁰)C(O)R¹⁰, —N(R¹⁰)C(O)N(R¹⁰)₂, —N(R¹⁰)₂, —C(O)R¹⁰, —C(O)OR¹⁰, —OC(O)R¹⁰, —NO₂, ═O, ═S, ═N(R¹⁰), —CN, C₃₋₁₂ carbocycle, and 3- to 12-membered heterocycle;

[0256] R¹⁰ is independently selected at each occurrence from hydrogen, —NH₂, —C(O)OCH₂C₆H₅; and C₁₋₁₀ alkyl optionally substituted with one or more substituents independently selected from halogen, —OH, —CN, —NO₂, —NH₂, ═O, ═S, —C(O)OCH₂C₆H₅, —NHC(O)OCH₂C₆H₅, C₃₋₁₂ carbocycle, and 3- to 12-membered heterocycle;

[0257] R²⁰, R²¹, R²², and R²³ are independently selected from hydrogen, halogen, —OR¹⁰, —SR¹⁰, —N(R¹⁰)₂, —S(O)R¹⁰, —S(O)₂R¹⁰, —C(O)R¹⁰, —C(O)OR¹⁰, —OC(O)R¹⁰, —NO₂, ═O, ═S, ═N(R¹⁰), —CN, C₁₋₁₀ alkyl, C2-1o alkenyl, and C2-1o alkynyl, such as R²⁰, R²¹, R²², and R²³ are each hydrogen; and

[0258] R²⁴, and R²⁵ are independently selected from hydrogen, halogen, —OR¹⁰, —SR¹⁰, —N(R¹⁰)₂, —S(O)R¹⁰, —S(O)₂R¹⁰, —C(O)R¹⁰, —C(O)OR¹⁰, —OC(O)R¹⁰, —NO₂, ═O, ═S, ═N(R¹⁰), —CN, C₁₋₁₀ alkyl, C₂₋₁₀ alkenyl, and C₂₋₁₀ alkynyl, such as R²⁴ and R²⁵ are each hydrogen.

[0259] In certain embodiments, the immune-stimulatory compound is a compound of Formula (IIIA), (IIIB) or (IIIC):

[chemical structure]

or a pharmaceutically acceptable salt thereof, wherein:

[0260] L¹¹ is —C(O)N(R¹⁰)—*, wherein * represents where L¹¹ is bound to R⁶;

[0261] L² is —C(O)—;

[0262] R¹ and R² are each hydrogen;

[0263] R⁴ is selected from: —OR¹⁰, —N(R¹⁰)₂, —C(O)N(R¹⁰)₂, —C(O)R¹⁰, —C(O)OR¹⁰, —S(O)R¹⁰, and —S(O)₂R¹⁰;

[0264] R⁶ is selected from phenyl and 5- or 6-membered heteroaryl, any one of which is substituted with one or more substituents selected from R⁷;

[0265] R⁷ is selected from —C(O)NHNH₂, —C(O)NH—C₁₋₃alkylene-NH(R¹⁰), —C(O)CH₃, —C₁₋₃alkylene-NHC(O)OR¹⁰, —C₁₋₃alkylene-NHC(O)R¹⁰, —C₁₋₃alkylene-NHC(O)NHR¹⁰, and —C₁₋₃alkylene-NHC(O)—C₁₋₃alkylene-(R¹⁰)₂;

[0266] R¹⁰ is independently selected at each occurrence from hydrogen, —NH₂, —C(O)OCH₂C₆H₅; and C₁₋₁₀ alkyl, C₂₋₁₀ alkenyl, C₂₋₁₀ alkynyl, C₃₋₁₂ carbocycle, and 3- to 12-membered heterocycle, each of which is independently optionally substituted at each occurrence with one or more substituents selected from halogen, —CN, —NO₂, —NH₂, ═O, ═S, —C(O)OCH₂C₆H₅, —NHC(O)OCH₂C₆H₅, C₁₋₁₀ alkyl, C₂₋₁₀ alkenyl, C₂₋₁₀ alkynyl, C₃₋₁₂ carbocycle, 3- to 12-membered heterocycle, and haloalkyl;

[0267] R¹¹ is selected from C₃₋₁₂ carbocycle and 3- to 12-membered heterocycle, each of which is independently optionally substituted with one or more substituents selected from R¹²; and

[0268] wherein any substitutable carbon on the benzazepine core or Formula (IIIA) is optionally substituted by a substituent independently selected from R¹², wherein R¹² is independently selected at each occurrence from halogen, —OR¹⁰, —SR¹⁰, —N(R¹⁰)₂, —C(O)R¹⁰, —C(O)N(R¹⁰)₂, —N(R¹⁰)C(O)R¹⁰, —C(O)OR¹⁰, —OC(O)R¹⁰, —S(O)R¹⁰, —S(O)₂R, —NO₂, ═O, ═S, ═N(R¹⁰), and —CN; and C₁₋₁₀ alkyl optionally substituted with one or more substituents independently selected from halogen, —OR¹⁰, —SR¹⁰, —N(R¹⁰)₂, —C(O)R¹⁰, —C(O)N(R¹⁰)₂, —N(R¹⁰)C(O)R¹⁰, —C(O)OR¹⁰, —OC(O)R¹⁰, —S(O)R¹⁰, —S(O)₂R¹⁰, —NO₂, ═O, ═S, ═N(R¹⁰), —CN, C₃₋₁₀ carbocycle and 3- to 10-membered heterocycle, or

[0269] for a compound of Formula (IIIB) or (IIIC), R²⁰, R²¹, R²², and R²³ are independently selected from hydrogen, halogen, —OR¹⁰, —SR¹⁰, —N(R¹⁰)₂, —S(O)R¹⁰, —S(O)₂R¹⁰, —C(O)R¹⁰, —C(O)OR¹⁰, —OC(O)R¹⁰, —NO₂, ═O, ═S, ═N(R¹⁰), —CN, C₁₋₁₀ alkyl, C₂₋₁₀ alkenyl, and C₂₋₁₀ alkynyl, such as R²⁰, R²¹, R²², and R²³ are each hydrogen; and

[0270] R²⁴, and R²⁵ are independently selected from hydrogen, halogen, —OR¹⁰, —SR¹⁰, —N(R¹⁰)₂, —S(O)R¹⁰, —S(O)₂R¹⁰, —C(O)R¹⁰, —C(O)OR¹⁰, —OC(O)R¹⁰, —NO₂, ═O, ═S, ═N(R¹⁰), —CN, C₁₋₁₀ alkyl, C₂₋₁₀ alkenyl, and C₂₋₁₀ alkynyl, such as R²⁴ and R²⁵ are each hydrogen.

[0271] In certain embodiments, for a compound or salt of Formula (IIIB) or (IIIC):

[chemical structure]

or a pharmaceutically acceptable salt thereof, wherein:

[0272] L¹¹ is —C(O)N(R¹⁰)—*, such as L¹¹ is —C(O)NH—, wherein * represents where L¹¹ is bound to R⁶;

[0273] L² is —C(O)—;

[0274] R¹ and R² are each hydrogen;

[0275] R⁴ is selected from: —OR¹⁰, —N(R¹⁰)₂, —C(O)N(R¹⁰)₂, —C(O)R¹⁰, —C(O)OR¹⁰, —S(O)R¹⁰, and —S(O)₂R¹⁰;

[0276] R⁶ is selected from phenyl and 5- or 6-membered heteroaryl, e.g., pyridyl, any one of which is substituted with one or more substituents selected from R⁷;

[0277] R⁷ is selected from —C(O)NHNH₂, —C(O)NH—C₁₋₃alkylene-NH(R¹⁰), —C(O)CH₃, —C₁₋₃alkylene-NHC(O)OR¹¹, —C₁₋₃alkylene-NHC(O)NHR¹⁰, and —C₁₋₃alkylene-NHC(O)—C₁₋₃alkylene-(R¹⁰)₂; and a 3- to 12-membered heterocycle optionally substituted with one or more substituents independently selected from R¹²;

[0278] R¹⁰ is independently selected at each occurrence from hydrogen, —NH₂, —C(O)OCH₂C₆H₅; and C₁₋₁₀ alkyl, C₂₋₁₀ alkenyl, C₂₋₁₀ alkynyl, C₃₋₁₂ carbocycle, and 3- to 12-membered heterocycle, each of which is independently optionally substituted at each occurrence with one or more substituents selected from halogen, —CN, —NO₂, —NH₂, ═O, ═S, —C(O)OCH₂C₆H₅, —NHC(O)OCH₂C₆H₅, C₁₋₁₀ alkyl, C₂₋₁₀ alkenyl, C₂₋₁₀ alkynyl, C₃₋₁₂ carbocycle, 3- to 12-membered heterocycle, and haloalkyl;

[0279] R¹¹ is selected from C3-12 carbocycle and 3- to 12-membered heterocycle, each of which is independently optionally substituted with one or more substituents selected from R¹² wherein R¹² is independently selected at each occurrence from halogen, —ORI, —SRI, —N(R¹⁰)₂, —C(O)R¹⁰, —C(O)N(R¹⁰)₂, —N(R¹⁰)C(O)R¹⁰, —C(O)OR¹⁰, —OC(O)R¹⁰, —S(O)R¹⁰, —S(O)₂R¹⁰, —NO₂, ═O, ═S, ═N(R¹⁰), and —CN; and C₁₋₁₀ alkyl optionally substituted with one or more substituents independently selected from halogen, —OR¹⁰, —SR¹⁰, —N(R¹⁰)₂, —C(O)R¹⁰, —C(O)N(R¹⁰)₂, —N(R¹⁰)C(O)R¹⁰, —C(O)OR¹⁰, —OC(O)R¹⁰, —S(O)R¹⁰, —S(O)₂R¹⁰, —NO₂, ═O, ═S, ═N(R¹⁰), —CN, C₃₋₁₀ carbocycle and 3- to 10-membered heterocycle;

[0280] R²⁰, R²¹, R²², and R²³ are independently selected from hydrogen, halogen, —OR¹⁰, —SR¹⁰, —N(R¹⁰)₂, —S(O)R¹⁰, —S(O)₂R¹⁰, —C(O)R¹⁰, —C(O)OR¹⁰, —OC(O)R¹⁰, —NO₂, ═O, ═S, ═N(R¹⁰), —CN, C₁₋₁₀ alkyl, C₂₋₁₀ alkenyl, and C₂₋₁₀ alkynyl, such as R²⁰, R²¹, R²², and R²³ are each hydrogen; and R²⁴, and R²⁵ are independently selected from hydrogen, halogen, —OR¹⁰, —SR¹⁰, —N(R¹⁰)₂, —S(O)R¹⁰, —S(O)₂R¹⁰, —C(O)R¹⁰, —C(O)OR¹⁰, —OC(O)R¹⁰, —NO₂, ═O, ═S, ═N(R¹⁰), —CN, C₁₋₁₀ alkyl, C₂₋₁₀ alkenyl, and C₂₋₁₀ alkynyl, such as R²⁴ and R²⁵ are each hydrogen.

[0281] In certain embodiments for a compound or salt of Formula (IA), (IB), (IC), (IIA), (IIB), (IIC), (IIIA), (IIIB), or (IIIC), the compound may further comprise a linker (L³), as described elsewhere herein. The linker may be covalently bound to any position, valence permitting, on a compound or salt of Formula (IA), (IB), (IC), (IIA), (IIB), (IIC), (IIIA), (IIIB), or (IIIC). In certain embodiments, the linker is bound to a nitrogen or oxygen atom of a compound or salt of Formula (IA), (IB), (IC), (IIA), (IIB), (IIC), (IIIA), (IIIB), or (IIIC). The linker may comprise a reactive moiety, e.g., an electrophile that can react to form a covalent bond with a moiety of an antibody, e.g., a lysine, serine, threonine, cysteine, tyrosine, aspartic acid, glutamine, a non-natural amino acid residue, or glutamic acid residue of an antibody. In some embodiments, a compound or salt of Formula (IA), (IB), (IC), (IIA), (IIB), (IIC), (IIIA), (IIIB), or (IIIC), may be covalently bound through the linker to an antibody.

[0282] In certain embodiments, an immune-modulatory agent can be a TLR7 or TLR8 agonist, such as S-27609, CL307, UC-IV150, imiquimod, gardiquimod, resiquimod, motolimod, VTS-1463GS-9620, GSK2245035, TMX-101, TMX-201, TMX-202, isatoribine, AZD8848, MEDI9197, 3M-051, 3M-852, 3M-052, 3M-854A, S-34240, KU34B, SB9200, SB11285, 8-substituted imidazo[1,5-a]pyridine, or CL663.

[0283] In some embodiments, an immune-stimulatory compound is a ligand of TLR9 selected from the group consisting of. ODN1585, ODN1668, ODN1826, PF-3512676 (ODN2006), ODN2007, ODN2216, ODN2336, ODN2395, BB-001, BB-006, CYT-003, IMO-2055, IMO-2125, IMO-3100, IMO-8400, IR-103, IMO-9200, agatolimod, DIMS-9054, DV-1079, DV-1179, AZD-1419, leftolimod (MGN-1703), litenimod, and CYT-003-QbGl0.

[0284] In some embodiments, an immune-stimulatory compound is a ligand of TLR10.

[0285] In other embodiments, an immune-modulatory agent selectively agonizes TLR9, TLR3, TLR4, TLR2, TLR5, RIG-I, STING, cGAS, NOD1, NOD2, NOD1/NOD2, NRLP3, ALPK1, MDAS AIM2, IRE1 and PERK

[0286] In some embodiments, an immune-modulatory agent is a ligand of nucleotide-oligomerization domain (NOD)-like selected from the group consisting of: NOD1 agonist (C12-iE-DAP, iE-DAP, Tri-DAP), NOD2 agonist (L18-MDP, MDP, M-TriLYS, M-TriLYS-D-ASN, Murabutide, N-Glycolyl-MDP), and NOD1/NOD2 agonists (M-TriDAP, PGN).

[0287] In some embodiments, an immune-modulatory agent is a ligand of one or more RIG-I-Like receptors (RLR) selected from the group consisting of: S′ppp-dsRNA, Poly (dA:dT), Poly(dG:dC), and Poly (I:C).

[0288] In some embodiments, an immune-modulatory agent is a ligand of one or more C-type lectin receptors (CLR) selected from the group consisting of: Cnrdlan AL, HKCA, HKSC, WGP, Zymosan, and Trehalose-6,6-dibehenate.

[0289] In some embodiments, an immune-modulatory agent is a ligand of one or more Cytosolic DNA Sensors (CDS) selected from the group consisting of: ADU-S100, c-GMP, c-G-AMP, c-G-GMP, c-A-AMP, c-di-AMP, c-di-IMP, c-di-GMP, c-di-UMP, HSV-60, ISD, pCpG, Poly (dA:dT), Poly(dG:dC), Poly (dA), VACV-70 and a-mangostin and the compounds disclosed in WO2018156625 (U of Texas), WO 2018152453 (Eisai), WO 2018138685 (Janssen), WO2018100558 (Takeda), WO2018098203 (Janssen), WO2018065360 (Biolog Life Sciences), WO2018060323 (Boehringer Ingelheim), WO2018045204 (IFM Therapeutics), WO2018009466 (Aduro), WO 2017161349 (Immune Sensor), WO2017123669, WO2017123657, WO2017027646 (Merck), WO2017027645 (Merck), WO2016120305 (GSK), WO2016096174 (InvivoGen), and US20140341976 (Aduro).

[0290] In some embodiments, an immune-modulatory agent can be a TLR7 agonist, such as TLR7 agonist R848. In some embodiments, an immune-modulatory agent is an imidazoquinoline, an imidazoquinoline amine, a thiazoquinoline, a guanosine analog, an adenosine analog, a thymidine homopolymer, ssRNA, CpG-A, PolyG10, or PolyG3. In some embodiments, an immune-modulatory agent is selected from the group consisting of gardiquimod, imiquimod, resiquimod, GS-9620, and imidazoquinoline 852A.

[0291] In certain embodiments, an immune-modulatory agent is a benzazepine, an imidazoquinoline, a thiazoloquinolone, an aminoquinoline or a ssRNA. In certain embodiments, a an immune-modulatory agent is selected from the group consisting of an imidazoquinoline, a thiazoloquinolone, an aminoquinoline and is other a ssRNA or a benzazepine. In certain embodiments, the TLR8 agonist is selected from VTX-2337, VTX-294 and resiquimod.

[0292] An immune-modulatory agent can be an inhibitor of TGFβ, TGFβRI, TGFβRII, the Beta-Catenin pathway, PI3K-beta, STAT3, IL-10, IDO or TDO. An immune-modulatory agent can be an inhibitor of TNIK or Tankyrase. In certain embodiments, an immune-modulatory agent is a kinase inhibitor. In certain embodiments, the kinase inhibitor can be an inhibitor of CDK4/6, such as, for example, abemaciclib or palbociclib.

[0293] An immune-modulatory agent can be LY2109761, GSK263771, iCRT3, iCRT5, iCRT14, LY2090314, CGX-1321, PRI-724, BC21, ZINCO2092166, LGK974, IWP2, LY3022859, LY364947, SB431542, AZD8186, SD-208, indoximod (NLG8189), F001287, GDC-0919, epacadostat (INCB024360), RG70099, 1-methyl-L-tryptophan, methylthiohydantoin tryptophan, brassinin, annulin B, exiguamine A, PIM, LM10, 8-substituted 2-amino-3H-benzo[b]azepine-4-carboxamide, or INCB023843.

[0294] An immune-modulatory agent can be an inhibitor of the β-catenin pathway, such as those disclosed in U.S. Pat. No. 9,505,749, US Published Application Nos. 2015/0044368 and 20150225396, Chinese application 107226808, WO 2017/076484, and WO 2018/046933, the disclosure of which is incorporated by reference herein.

### Linkers

[0295] The conjugates described herein include a linker or linkers that attach at least one immune-modulatory agent to an antibody construct. The linker may be a cleavable linker, e.g., a peptide linker, or a non-cleavable linker. A conjugate can comprise multiple linkers. These linkers can be the same linkers or different linkers.

[0296] As will be appreciated by skilled artisans, the linkers attach an immune-modulatory agent(s) to an antibody construct by forming a covalent linkage to the immune-modulatory agent at one location and a covalent linkage to the antibody construct of the conjugate at another. Covalent linkages can be formed by reaction between functional groups on the linker and functional groups on the agents and antibody construct of the conjugate. As used herein, the expression “linker” can include (i) unconjugated forms of the linker that can include a functional group capable of covalently attaching the linker to an immune-modulatory agent and a functional group capable of covalently attaching the linker to an antibody construct; (ii) partially conjugated forms of the linker that can include a functional group capable of covalently attaching the linker to an antibody construct of the conjugate and that can be covalently attached to an immune-modulatory agent, or vice versa; and (iii) fully conjugated forms of the linker that can be covalently attached to both an immune-modulatory agent and an antibody construct of the conjugate. In some embodiments, in the immune-modulatory conjugates described herein, moieties comprising the functional groups on the linker and covalent linkages formed between the linker and antibody construct of the conjugate can be specifically illustrated as Rx and Rx respectively.

[0297] One embodiment pertains to a conjugate formed by contacting an antibody construct that binds a cell surface receptor, such as a tumor antigen expressed on a tumor cell, with a linker attached to an immune-modulatory agent under conditions in which the linker covalently attaches to the antibody construct. One embodiment pertains to a method of making a conjugate formed by contacting a linker attached to an immune-modulatory agent under conditions in which the linker covalently links to an antibody construct.

[0298] As further described herein, a linker can be short, flexible, rigid, hydrophilic or hydrophobic. A linker can contain segments that have different characteristics, such as segments of flexibility or segments of rigidity. A linker can be chemically stable to extracellular environments, for example, chemically stable in the blood stream, or may include linkages that are not stable. The linker can include linkages that are designed to cleave and/or immolate or otherwise breakdown specifically or non-specifically inside cells. A cleavable linker can be sensitive to enzymes. A cleavable linker can be cleaved by enzymes such as proteases.

### Selectively Protease Cleavable Linkers for Selective Release of Immune-Modulatory Agents

[0299] In one embodiment, the cleavable linkers are specifically cleaved by a protease that is present in the extracellular portion of the disease microenvironment. A cleavable linker can contain protease cleavage site for a protease that is over-expressed in the disease microenvironment. Cleavage of the protease cleavage site allows selective release of the immune-modulatory agent in the disease environment, while sparing normal tissues from the immune-modulatory agent.

[0300] In some embodiments, the cleavable linker contains a protease cleavage site for a protease selected from the group consisting of legumain, plasmin, TMPRSS3, TMPRSS4, TMPRSS6, MMP1, MMP2, MMP-3, MMP-9, MMP-8, MMP-14, MT1-MMP, CATHEPSIN D, CATHEPSIN K, CATHEPSIN S, ADAM10, ADAM12, ADAMTS, Caspase-1, Caspase-2, Caspase-3, Caspase-4, Caspase-5, Caspase-6, Caspase-7, Caspase-8, Caspase-9, Caspase-10, Caspase-11, Caspase-12, Caspase-13, Caspase-14, TACE, human neutrophil elastase, beta-secretase, uPA, fibroblast associated protein, matriptase, PSMA and PSA. In some embodiments, the cleavable linker contains a protease cleavage site for a protease selected from the group consisting of TMPRSS3, TMPRSS4, TMPRSS6, MMP1, MMP2, MMP-3, MMP-9, MMP-8, MMP-14, MT1-MMP, CATHEPSIN D, CATHEPSIN K, CATHEPSIN S, ADAM10, ADAM12, ADAMTS, Caspase-1, Caspase-2, Caspase-3, Caspase-4, Caspase-5, Caspase-6, Caspase-7, Caspase-8, Caspase-9, Caspase-10, Caspase-11, Caspase-12, Caspase-13, Caspase-14, TACE, human neutrophil elastase, beta-secretase, uPA, fibroblast associated protein, matriptase, PSMA and PSA.

[0301] Exemplary protease cleavage sites include the following: Pro-urokinase, PRFKIIGG or PRFRIIGG; TGFbeta, SSRHRRALD; Plasminogen, RKSSIIIRMRDVVL; MMP cleavable sequences: Gelatinase, A PLGLWA; Collagenase cleavable sequences: Calf skin collagen (alpha1(I) chain), GPQGIAGQ, Calf skin collagen (alpha2(I) chain), GPQGLLGA; Bovine cartilage collagen (alpha(II) chain), GIAGQ, Human liver collagen (alphal(III) chain), GPLGIAGI; Human alpha2M, GPEGLRVG; Human PZP, YGAGLGVV, AGLGVVER or AGLGISST; and Human fibroblast collagenase, DVAQFVLT (autolytic cleavages), VAQFVLTE, AQFVLTEG or PVQPIGPQ.

[0302] In some embodiments, the protease cleavage site is a substrate for at least one MMP. In some embodiments, the protease cleavage site is a substrate for a protease selected from the group consisting of MMP9, MMP14, MMP1, MMP3, MMP13, MMP17, MMP11, and MMP19. In some embodiments the protease cleavage site is a substrate for MMP9.

[0303] In some embodiments, the protease cleavage site is a substrate for MMP14. In some embodiments, the protease cleavage site is a substrate that includes the sequence (SEQ ID NO: 570); SARGPSRW (SEQ ID NO: 571); TARGPSFK (SEQ ID NO: 572); LSGRSDNH (SEQ ID NO: 573); GGWHTGRN (SEQ ID NO: 574); HTGRSGAL (SEQ ID NO: 575); PLTGRSGG (SEQ ID NO: 576); AARGPAIH (SEQ ID NO: 577) RGPAFNPM (SEQ ID NO: 578); SSRGPA YL (SEQ ID NO: 579); RGPATPIM (SEQ ID NO: 580); RGPA (SEQ ID NO: 581); GGQPSGMWGW (SEQ ID NO: 582); FPRPLGITGL (SEQ ID NO: 583); VHMPLGFLGP (SEQ ID NO: 584); SPLTGRSG (SEQ ID NO: 585); SAGFSLPA (SEQ ID NO: 586); LAPLGLQRR (SEQ ID NO: 587); SGGPLGVR (SEQ ID NO: 588); PLGL (SEQ ID NO: 589); LSGRSGNH (SEQ ID NO: 590); SGRSANPRG (SEQ ID NO: 591); LSGRSDDH (SEQ ID NO: 592); LSGRSDIH (SEQ ID NO: 593); LSGRSDQH (SEQ ID NO: 594); LSGRSDTH (SEQ ID NO: 595); LSGRSDYH (SEQ ID NO: 596); LSGRSDNP (SEQ ID NO: 597); LSGRSANP (SEQ ID NO: 598); LSGRSANI (SEQ ID NO: 599); and/or LSGRSDNI (SEQ ID NO: 600).

[0304] In some embodiments, the protease cleavage site comprises the amino acid sequence LSGRSDNH (SEQ ID NO: 601). In some embodiments, the protease cleavage site comprises the amino acid sequence TGRGPSWV (SEQ ID NO: 602). In some embodiments, the protease cleavage site comprises the amino acid sequence PLTGRSGG (SEQ ID NO: 603). In some embodiments, the protease cleavage site comprises the amino acid sequence GGQPSGMWGW (SEQ ID NO: 604). In some embodiments, the protease cleavage site comprises the amino acid sequence FPRPLGITGL (SEQ ID NO: 605). In some embodiments, the protease cleavage site comprises the amino acid sequence VHMPLGFLGP (SEQ ID NO: 606). In some embodiments, the protease cleavage site comprises the amino acid sequence PLGL (SEQ ID NO: 607). In some embodiments, the protease cleavage site comprises the amino acid sequence SARGPSRW (SEQ ID NO: 608). In some embodiments, the protease cleavage site comprises the amino acid sequence TARGPSFK (SEQ ID NO: 609). In some embodiments, the protease cleavage site comprises the amino acid sequence GGWHTGRN (SEQ ID NO: 610). In some embodiments, the protease cleavage site comprises the amino acid sequence HTGRSGAL (SEQ ID NO: 611). In some embodiments, the protease cleavage site comprises the amino acid sequence AARGPAIH (SEQ ID NO: 612). In some embodiments, the protease cleavage site comprises the amino acid sequence RGPAFNPM (SEQ ID NO: 613). In some embodiments, the protease cleavage site comprises the amino acid sequence SSRGPAYL (SEQ ID NO: 614). In some embodiments, the protease cleavage site comprises the amino acid sequence RGPATPIM (SEQ ID NO: 615). In some embodiments, the protease cleavage site comprises the amino acid sequence RGPA (SEQ ID NO: 616). In some embodiments, the protease cleavage site comprises the amino acid sequence LSGRSGNH (SEQ ID NO: 617). In some embodiments, the protease cleavage site comprises the amino acid sequence SGRSANPRG (SEQ ID NO: 618). In some embodiments, the protease cleavage site comprises the amino acid sequence LSGRSDDH (SEQ ID NO: 619). In some embodiments, the protease cleavage site comprises the amino acid sequence LSGRSDIH (SEQ ID NO: 620). In some embodiments, the protease cleavage site comprises the amino acid sequence LSGRSDQH (SEQ ID NO: 621). In some embodiments, the protease cleavage site comprises the amino acid sequence LSGRSDTH (SEQ ID NO: 622). In some embodiments, the protease cleavage site comprises the amino acid sequence LSGRSDYH (SEQ ID NO: 623). In some embodiments, the protease cleavage site comprises the amino acid sequence LSGRSDNP (SEQ ID NO: 624). In some embodiments, the protease cleavage site comprises the amino acid sequence LSGRSANP (SEQ ID NO: 625). In some embodiments, the protease cleavage site comprises the amino acid sequence LSGRSANI (SEQ ID NO: 626). In some embodiments, the protease cleavage site comprises the amino acid sequence LSGRSDNI (SEQ ID NO: 627).

[0305] In some embodiments, the protease cleavage site is a substrate for an MMP and includes the sequence ISSGLSS (SEQ ID NO: 628); QNQALRMA (SEQ ID NO: 629); AQNLLGMV (SEQ ID NO: 630); STFPFGMF (SEQ ID NO: 631); PVGYTSSL (SEQ ID NO: 632); DWL YWPGI (SEQ ID NO: 633), ISSGLLSS (SEQ ID NO: 634), LKAAPRWA (SEQ ID NO: 635); GPSHLVLT (SEQ ID NO: 636); LPGGLSPW (SEQ ID NO: 637); MGLFSEAG (SEQ ID NO: 638); SPLPLRVP (SEQ ID NO: 639); RMHLRSLG (SEQ ID NO: 640); LAAPLGLL (SEQ ID NO: 641); AVGLLAPP (SEQ ID NO: 642); LLAPSHRA (SEQ ID NO: 643); PAGLWLDP (SEQ ID NO: 644); MIAPVA YR (SEQ ID NO: 645); RPSPMWAY (SEQ ID NO: 646); WATPRPMR (SEQ ID NO: 647); FRLLDWQW (SEQ ID NO: 648); ISSGL (SEQ ID NO: 649); ISSGLLS (SEQ ID NO: 650); and/or ISSGLL (SEQ ID NO: 651).

[0306] In some embodiments, the protease cleavage site comprises the amino acid sequence ISSGLSS (SEQ ID NO: 652). In some embodiments, the protease cleavage site comprises the amino acid sequence QNQALRMA (SEQ ID NO: 653). In some embodiments, the protease cleavage site comprises the amino acid sequence AQNLLGMV (SEQ ID NO: 654). In some embodiments, the protease cleavage site comprises the amino acid sequence STFPFGMF (SEQ ID NO: 655). In some embodiments, the protease cleavage site comprises the amino acid sequence PVGYTSSL (SEQ ID NO: 656). In some embodiments, the protease cleavage site comprises the amino acid sequence DWL YWPGI (SEQ ID NO: 657). In some embodiments, the protease cleavage site comprises the amino acid sequence ISSGLLSS (SEQ ID NO: 658). In some embodiments, the protease cleavage site comprises the amino acid sequence LKAAPRWA (SEQ ID NO: 659). In some embodiments, the protease cleavage site comprises the amino acid sequence GPSHLVLT (SEQ ID NO: 660). In some embodiments, the protease cleavage site comprises the amino acid sequence LPGGLSPW (SEQ ID NO: 661). In some embodiments, the protease cleavage site comprises the amino acid sequence MGLFSEAG (SEQ ID NO: 662). In some embodiments, the protease cleavage site comprises the amino acid sequence SPLPLRVP (SEQ ID NO: 663). In some embodiments, the protease cleavage site comprises the amino acid sequence RMHLRSLG (SEQ ID NO: 664). In some embodiments, the protease cleavage site comprises the amino acid sequence LAAPLGLL (SEQ ID NO: 665). In some embodiments, the protease cleavage site comprises the amino acid sequence A VGLLAPP (SEQ ID NO: 666). In some embodiments, the protease cleavage site comprises the amino acid sequence LLAPSHRA (SEQ ID NO: 667). In some embodiments, the protease cleavage site comprises the amino acid sequence PAGLWLDP (SEQ ID NO: 668). In some embodiments, the protease cleavage site comprises the amino acid sequence MIAPV A YR (SEQ ID NO: 669). In some embodiments, the protease cleavage site comprises the amino acid sequence RPSPMWAY (SEQ ID NO: 670). In some embodiments, the protease cleavage site comprises the amino acid sequence WATPRPMR (SEQ ID NO: 671). In some embodiments, the protease cleavage site comprises the amino acid sequence FRLLDWQW (SEQ ID NO: 672). In some embodiments, the protease cleavage site comprises the amino acid sequence ISSGL (SEQ ID NO: 673). In some embodiments, the protease cleavage site comprises the amino acid sequence ISSGLLS (SEQ ID NO: 674). In some embodiments, the protease cleavage site comprises the amino acid sequence ISSGLL (SEQ ID NO: 675).

[0307] In some embodiments, the protease cleavage site is a substrate for thrombin. In some embodiments, the protease cleavage site is a substrate for thrombin and includes the sequence GPRSFGL (SEQ ID NO: 676) or GPRSFG (SEQ ID NO: 677). In some embodiments, the protease cleavage site comprises the amino acid sequence GPRSFGL (SEQ ID NO: 678).

[0308] In some embodiments, the protease cleavage site comprises the amino acid sequence GPRSFG (SEQ ID NO: 679). In some embodiments, the protease cleavage site comprises an amino acid sequence selected from the group consisting of NTLSGRSENHSG (SEQ ID NO: 680); NTLSGRSGNHGS (SEQ ID NO: 681); TSTSGRSANPRG (SEQ ID NO: 682); TSGRSANP (SEQ ID NO: 683); VAGRSMRP (SEQ ID NO: 684); VVPEGRRS (SEQ ID NO: 685); ILPRSPAF (SEQ ID NO: 686); MVLGRSLL (SEQ ID NO: 687); QGRAITFI (SEQ ID NO: 688); SPRSIMLA (SEQ ID NO: 689); and SMLRSMPL (SEQ ID NO: 690).

[0309] In some embodiments, the protease cleavage site comprises the amino acid sequence NTLSGRSENHSG (SEQ ID NO: 691). In some embodiments, the protease cleavage site comprises the amino acid sequence NTLSGRSGNHGS (SEQ ID NO: 692). In some embodiments, the protease cleavage site comprises the amino acid sequence TSTSGRSANPRG (SEQ ID NO: 693). In some embodiments, the protease cleavage site comprises the amino acid sequence TSGRSANP (SEQ ID NO: 694). In some embodiments, the protease cleavage site comprises the amino acid sequence VAGRSMRP (SEQ ID NO: 695). In some embodiments, the protease cleavage site comprises the amino acid sequence VVPEGRRS (SEQ ID NO: 696). In some embodiments, the protease cleavage site comprises the amino acid sequence ILPRSP AF (SEQ ID NO: 697). In some embodiments, the protease cleavage site comprises the amino acid sequence MVLGRSLL (SEQ ID NO: 698). In some embodiments, the protease cleavage site comprises the amino acid sequence QGRAITFI (SEQ ID NO: 699). In some embodiments, the protease cleavage site comprises the amino acid sequence SPRSIMLA (SEQ ID NO: 700). In some embodiments, the protease cleavage site comprises the amino acid sequence SMLRSMPL (SEQ ID NO: 701).

[0310] In some embodiments, the protease cleavage site is a substrate for a neutrophil elastase. In some embodiments, the protease cleavage site is a substrate for a serine protease. In some embodiments, the protease cleavage site is a substrate for uPA. In some embodiments, the protease cleavage site is a substrate for legumain. In some embodiments, the protease cleavage site is a substrate for matriptase. In some embodiments, the protease cleavage site is a substrate for a cysteine protease. In some embodiments, the protease cleavage site is a substrate for a cysteine protease, such as a cathepsin.

[0311] In some embodiments, the protease cleavage site comprises an amino acid sequence selected from the following: LSGRSDNH; (SEQ ID NO: 702) TGRGPSWV; (SEQ ID NO: 703) PLTGRSGG; (SEQ ID NO: 704) TARGPSFK; (SEQ ID NO: 705) NTLSGRSENHSG; (SEQ ID NO: 706) NTLSGRSGNHGS; (SEQ ID NO: 707) TSTSGRSANPRG; (SEQ ID NO: 708) TSGRSANP; (SEQ ID NO: 709) VHMPLGFLGP; (SEQ ID NO: 710) AVGLLAPP; (SEQ ID NO: 711) AQNLLGMV; (SEQ ID NO: 712) QNQALRMA; SEQ ID NO: 713) LAAPLGLL; (SEQ ID NO: 714) STFPFGMF; (SEQ ID NO: 715) ISSGLLSS; (SEQ ID NO: 716) PAGLWLDP; (SEQ ID NO: 717) VAGRSMRP; (SEQ ID NO: 718) VVPEGRRS; (SEQ ID NO: 719) ILPRSPAF; (SEQ ID NO: 720) MVLGRSLL; (SEQ ID NO: 721) QGRAITFI; (SEQ ID NO: 722) SPRSIMLA; (SEQ ID NO: 723) SMLRSMPL; (SEQ ID NO: 724) SARGPSRW; (SEQ ID NO: 725) GWHTGRN; (SEQ ID NO: 726) HTGRSGAL; (SEQ ID NO: 727) AARGPAIH; (SEQ ID NO: 728) RGPAFNPM; (SEQ ID NO: 729) SSRGPAYL; (SEQ ID NO: 730) RGPATPIM; (SEQ ID NO: 731) RGPA; (SEQ ID NO: 732) GGQPSGMWGW; (SEQ ID NO: 733) FPRPLGITGL; (SEQ ID NO: 734) SPLTGRSG; (SEQ ID NO: 735) SAGFSLPA; (SEQ ID NO: 736) LAPLGLQRR; (SEQ ID NO: 737) SGGPLGVR; (SEQ ID NO: 738) PLGL; (SEQ ID NO: 739) ISSGLSS; (SEQ ID NO: 740) PVGYTSSL; (SEQ ID NO: 741) DWLYWPGI; (SEQ ID NO: 742) LKAAPRWA; (SEQ ID NO: 743) GPSHLVLT; (SEQ ID NO: 744) LPGGLSPW; (SEQ ID NO: 745) MGLFSEAG; (SEQ ID NO: 746) SPLPLRVP; (SEQ ID NO: 747) RMHLRSLG; (SEQ ID NO: 748) LLAPSHRA; (SEQ ID NO: 749) GPRSFGL; (SEQ ID NO: 750) GPRSFG; (SEQ ID NO: 751) LSGRSGNH; (SEQ ID NO: 752) SGRSANPRG; (SEQ ID NO: 753) LSGRSDDH; (SEQ ID NO: 754) LSGRSDIH; (SEQ ID NO: 755) LSGRSDQH; (SEQ ID NO: 756) LSGRSDTH; (SEQ ID NO: 757) LSGRSDYH; (SEQ ID NO: 758) LSGRSDNP; (SEQ ID NO: 759) LSGRSANP; (SEQ ID NO: 760) LSGRSANI; (SEQ ID NO: 761) LSGRSDNI; (SEQ ID NO: 762) MIAPVAYR; (SEQ ID NO: 763) RPSPMWAY; (SEQ ID NO: 764) WATPRPMR; (SEQ ID NO: 765) FRLLDWQW; (SEQ ID NO: 766) ISSGL; (SEQ ID NO: 767) ISSGLLS; (SEQ ID NO: 768) ISSGLL; (SEQ ID NO: 769) ISSGLLSGRSDNH; (SEQ ID NO: 770) AVGLLAPPGGLSGRSDNH; (SEQ ID NO: 771) ISSGLLSSGGSGGSLSGRSDNH; (SEQ ID NO: 772) ISSGLLSSGGSGGSLSGRSDNH; (SEQ ID NO: 773) AVGLLAPPGGTSTSGRSANPRG; (SEQ ID NO: 774) TSTSGRSANPRGGGAVGLLAPP; (SEQ ID NO: 775) VHMPLGFLGPGGTSTSGRSANPRG (SEQ ID NO: 776) TSTSGRSANPRGGGVHMPLGFLGP (SEQ ID NO: 777) LSGRSDNHGGAVGLLAPP (SEQ ID NO: 778) VHMPLGFLGPGGLSGRSDNH (SEQ ID NO: 779) LSGRSDNHGGVHMPLGFLGP (SEQ ID NO: 780) SGRSDNHGGSGGSISSGLLSS (SEQ ID NO: 781) LSGRSGNHGGSGGSISSGLLSS (SEQ ID NO: 782) ISSGLLSSGGSGGSLSGRSGNH (SEQ ID NO: 783) LSGRSDNHGGSGGSQNQALRMA (SEQ ID NO: 784) QNQALRMAGGSGGSLSGRSDNH (SEQ ID NO: 785) LSGRSGNHGGSGGSQNQALRMA (SEQ ID NO: 786) QNQALRMAGGSGGSLSGRSGNH (SEQ ID NO: 787) ISSGLLSGRSGNH (SEQ ID NO: 788) ISSGLLSSGGSGGSLSGRNH (SEQ ID NO: 789) ISSGLLSGRSANPRG (SEQ ID NO: 790) AVGLLAPPTSGRSANPRG (SEQ ID NO: 791) AVGLLAPPSGRSANPRG (SEQ ID NO: 792) ISSGLLSGRSDDH (SEQ ID NO: 793) ISSGLLSGRSDIH SEQ ID NO: 794) ISSGLLSGRSDQH (SEQ ID NO: 795) ISSGLLSGRSDTH (SEQ ID NO: 796) ISSGLLSGRSDYH (SEQ ID NO: 797) ISSGLLSGRSDNP (SEQ ID NO: 798) ISSGLLSGRSANP (SEQ ID NO: 799) ISSGLLSGRSANI (SEQ ID NO: 800) AVGLLAPPGGLSGRSDDH (SEQ ID NO: 801) AVGLLAPPGGLSGRSDIH (SEQ ID NO: 802) AVGLLAPPGGLSGRSDQH (SEQ ID NO: 803) AVGLLAPPGGLSGRSDTH (SEQ ID NO: 804) AVGLLAPPGGLSGRSDYH (SEQ ID NO: 805) AVGLLAPPGGLSGRSDNP (SEQ ID NO: 806) AVGLLAPPGGLSGRSANP (SEQ ID NO: 807) AVGLLAPPGGLSGRSANI (SEQ ID NO: 808) ISSGLLSGRSDNI (SEQ ID NO: 809) or AVGLLAPPGGLSGRSDNI (SEQ ID NO: 810).

[0312] A linker containing such a protease cleavage site can further contain a pentafluorophenyl group, a succimide or a maleimide group. A linker containing such a protease cleavage site can further contain a para aminobenzoic acid (PABA) group, a para aminobenzoic acid (PABA) group and a maleimide, or a PABA group and a pentafluorophenyl group. A linker containing such a protease cleavage site can further contain a PABA group and a succinimide group or a PABA group and a maleimide group. A linker can be a (maleimidocaproyl)-(protease cleavage site)-(para-aminobenzyloxycarbonyl) linker.

[0313] A cleavable linker can also contain segments of alkylene, alkenylene, alkynylene, polyether, polyester, polyamide, polyamino acids, polypeptides, or aminobenzylcarbamates. A cleavable linker can contain a maleimide at one end and a selectively cleavage protease cleavage siet at the other end. A linker can contain a lysine with an N-terminal amine acetylated, and a protease cleavage site. A linker can include a segment created by a microbial transglutaminase, wherein the link can be created between an amine-containing moiety and a moiety engineered to contain glutamine as a result of the enzyme catalyzing a bond formation between the acyl group of a glutamine side chain and the primary amine of a lysine chain. A linker can contain a reactive primary amine. A linker can be a Sortase A linker. A Sortase A linker can be created by a Sortase A enzyme fusing an LXPTG recognition motif (SEQ ID NO: 811) to an N-terminal GGG motif to regenerate a native amide bond. The linker created can therefore link a moiety attached to the LXPTG recognition motif (SEQ ID NO: 811) with a moiety attached to the N-terminal GGG motif. A linker can be a link created between an unnatural amino acid on one moiety reacting with oxime bond that was formed by modifying a ketone group with an alkoxyamine on another moiety. A moiety can be a portion of an antibody construct, such as an antibody. A moiety can be an immune-modulatory agent. A moiety can be a binding domain. A linker can be unsubstituted or substituted, for example, with a substituent. A substituent can include, for example, hydroxyl groups, amino groups, nitro groups, cyano groups, azido groups, carboxyl groups, carboxaldehyde groups, imine groups, alkyl groups, alkenyl groups, alkynyl groups, alkoxy groups, acyl groups, acyloxy groups, amide groups, and ester groups.

[0314] The cleavable linkers are specifically cleaved by a protease that is present in the extracellular portion of the disease microenvironment. For example, in some embodiments, a linker contains a protease cleavage site for a protease selected from the group consisting of legumain, plasmin, TMPRSS3, TMPRSS4, TMPRSS6, MMP1, MMP2, MMP-3, MMP-9, MMP-8, MMP-14, MT1-MMP, CATHEPSIN D, CATHEPSIN K, CATHEPSIN S, ADAM10, ADAM12, ADAMTS, Caspase-1, Caspase-2, Caspase-3, Caspase-4, Caspase-5, Caspase-6, Caspase-7, Caspase-8, Caspase-9, Caspase-10, Caspase-11, Caspase-12, Caspase-13, Caspase-14, TACE, human neutrophil elastase, beta-secretase, uPA, fibroblast associated protein, matriptase, PSMA and PSA. In some embodiments, a linker contains a protease cleavage site for a protease selected from the group consisting of TMPRSS3, TMPRSS4, TMPRSS6, MMP1, MMP2, MMP-3, MMP-9, MMP-8, MMP-14, MT1-MMP, CATHEPSIN D, CATHEPSIN K, CATHEPSIN S, ADAM10, ADAM12, ADAMTS, Caspase-1, Caspase-2, Caspase-3, Caspase-4, Caspase-5, Caspase-6, Caspase-7, Caspase-8, Caspase-9, Caspase-10, Caspase-11, Caspase-12, Caspase-13, Caspase-14, TACE, human neutrophil elastase, beta-secretase, uPA, fibroblast associated protein, matriptase, PSMA and PSA. In some embodiments, a linker contains a protease cleavage site for a matrix metalloprotease selected from the group consisting of MMP1, MMP2, MMP-3, MMP-9, MMP-8, MMP-14, and MT1-MMP. In some embodiments, a linker contains a protease cleavage site for a caspace protease selected from the group consisting of Caspase-1, Caspase-2, Caspase-3, Caspase-4, Caspase-5, Caspase-6, Caspase-7, Caspase-8, Caspase-9, Caspase-10, Caspase-11, Caspase-12, Caspase-13, and Caspase-14. In some embodiments, a linker contains a protease cleavage site for a protease selected from the group consisting of TMPRSS3, TMPRSS4, and TMPRSS6. In some embodiments, the linker contains a protease cleavage site for a protease selected from the group consisting of TACE, human neutrophil elastase, beta-secretase, uPA, fibroblast associated protein, matriptase, PSMA and PSA.

[0315] The direct attachment of an immune-modulatory agent to a peptide linker can result in proteolytic release of an amino acid adduct of the immune-modulatory agent. Such adducts can be active in vivo. Alternatively, the direct attachment of an immune-modulatory agent to a peptide linker can result in proteolytic release of an amino acid adduct of the immune-modulatory agent, thereby impairing its activity. In some embodiments, selectively protease cleavable linkers can include a self-immolative spacer to spatially separate an immune-modulatory agent from the site of proteolytic cleavage. The use of a self-immolative spacer can allow for the elimination of the fully active, chemically unmodified immune-modulatory agent upon amide bond hydrolysis.

[0316] One self-immolative spacer can be a bifunctional para-aminobenzyl alcohol group, which can link to the peptide through the amino group, forming an amide bond, while amine containing immune-modulatory agents can be attached through carbamate functionalities to the benzylic hydroxyl group of the linker (to give a p-amidobenzylcarbamate, PABC). The resulting pro-immune-modulatory agent can be activated upon protease-mediated cleavage, leading to a 1,6-elimination reaction releasing the unmodified immune-modulatory agent, carbon dioxide, and remnants of the linker. The following scheme depicts the fragmentation of p-amidobenzyl carbamate and release of the immune-modulatory agent:

[chemical structure]

wherein X-D represents the unmodified immune-modulatory agent.

[0317] Additionally, immune-modulatory agents containing a phenol group can be covalently bonded to a linker through the phenolic oxygen. One such linker relies on a methodology in which a diamino-ethane “Space Link” is used in conjunction with traditional “PABO”-based self-immolative groups to deliver phenol-containing compounds.

[0318] Immune-modulatory agents containing an aromatic or aliphatic hydroxyl group can be covalently bonded to a linker through the hydroxyl group using a methodology that relies on a methylene carbamate linkage, as described in WO 2015/095755.

[0319] The cleavable linkers can include non-cleavable portions or segments, and/or cleavable segments or portions can be included in an otherwise non-cleavable linker to render it cleavable. By way of example only, polyethylene glycol (PEG) and related polymers can include cleavable groups in the polymer backbone. For example, a polyethylene glycol or polymer linker can include one or more protease cleavable groups.

[0320] A linker can comprise an protease cleavable peptide moiety, for example, a linker comprising structural formula (IVa), (IVb), (IVc), or (IVd):

[chemical structure]

[0321] or a salt thereof, wherein: peptide represents a peptide (illustrated N→C, wherein peptide includes the amino and carboxy “termini”) a cleavable by a lysosomal enzyme; T represents a polymer comprising one or more ethylene glycol units or an alkylene chain, or combinations thereof; R^{a} is selected from hydrogen, alkyl, sulfonate and methyl sulfonate; R^{y} is hydrogen or C₁₋₄ alkyl-(O)ᵣ—C₁₋₄ alkylene)ₛ-G¹ or C₁₋₄ alkyl-(N)—[(C₁₋₄ alkylene)-G¹]₂; R_{z} is C₁₋₄ alkyl-(O)ᵣ—(C₁₋₄ alkylene)ₛ-G²; G¹ is SO₃H, CO₂H, PEG 4-32, or sugar moiety; G² is SO₃H, CO₂H, or PEG 4-32 moiety; r is 0 or 1; s is 0 or 1; p is an integer ranging from 0 to 5; q is 0 or 1; x is 0 or 1; y is 0 or 1; [symbol] represents the point of attachment of the linker to the immune-modulatory agent; and represents the point of attachment to the remainder of the linker.

[0322] Attachment groups that are used to attach the linkers in a conjugate can be electrophilic in nature and include, for example, maleimide groups, activated disulfides, active esters such as NHS esters and HOBt esters, haloformates, acid halides, alkyl, and benzyl halides such as haloacetamides. There are also emerging technologies related to “self-stabilizing” maleimides and “bridging disulfides” that can be used in accordance with the disclosure.

[0323] One example of a “self-stabilizing” maleimide group that hydrolyzes spontaneously under conjugation conditions to give a conjugate species with improved stability is depicted in the schematic below. Thus, the maleimide attachment group is reacted with a sulfhydryl of an antibody construct to give an intermediate succinimide ring. The hydrolyzed (open ring) form of the attachment group is resistant to deconjugation in the presence of plasma proteins.

[chemical structure]

[0324] A method for bridging a pair of sulfhydryl groups derived from reduction of a native hinge disulfide bond has been disclosed and is depicted in the schematic below. An advantage of this methodology can be the ability to synthesize homogenous DAR4 conjugates by full reduction of IgGs (to give 4 pairs of sulfhydryls) followed by reaction with 4 equivalents of the alkylating agent. Conjugates containing “bridged disulfides” can also have increased stability.

[chemical structure]

[0325] Similarly, as depicted below, a maleimide derivative that can bridge a pair of sulfhydryl groups has been developed.

[chemical structure]

[0326] The attachment moiety can contain the following structural formulas (VIIa), (VIIb), or (VIIc):

[chemical structure]

or salts thereof, wherein: R^{q} is H or —O—(CH₂CH₂O)₁₁—CH₃; x is 0 or 1; y is 0 or 1; G² is —CH₂CH₂CH₂SO₃H or —CH₂CH₂O—(CH₂CH₂O)₁₁—CH₃; R^{w} is —O—CH₂CH₂SO₃H or —NH(CO)—CH₂CH₂O—(CH₂CH₂O)₁₂—CH₃; and * represents the point of attachment to the remainder of the linker.

### Linkers of Conjugates Having Engineered Fc Domains for Selective Delivery of Immuno-Modulatory Agents

[0327] In some embodiments, a conjugate has an engineered Fc domain for selective delivery of an immune-modulatory agent(s). An immune-modulatory agent can be attached to the antibody construct by way of cleavable or non-cleavable linkers. Such a linker attaching an immune-modulatory agent to the antibody construct can be short, long, hydrophobic, hydrophilic, flexible or rigid, or may be composed of segments that each independently have one or more of the above-mentioned properties such that the linker may include segments having different properties. The linkers can be polyvalent such that they covalently attach more than one immune-modulatory agent to a single site on the antibody construct, or monovalent such that covalently they attach a single immune-modulatory agent to a single site on the antibody construct.

[0328] In some embodiments, the linker is specifically cleaved by a protease that is present in the extracellular portion of the disease microenvironment, as described herein. For example, in some embodiments, a linker contains a protease cleavage site for a protease selected from the group consisting of TMPRSS3, TMPRSS4, TMPRSS6, MMP1, MMP2, MMP-3, MMP-9, MMP-8, MMP-14, MT1-MMP, CATHEPSIN D, CATHEPSIN K, CATHEPSIN S, ADAM10, ADAM12, ADAMTS, Caspase-1, Caspase-2, Caspase-3, Caspase-4, Caspase-5, Caspase-6, Caspase-7, Caspase-8, Caspase-9, Caspase-10, Caspase-11, Caspase-12, Caspase-13, Caspase-14, TACE, human neutrophil elastase, beta-secretase, uPA, fibroblast associated protein, matriptase, PSMA and PSA. In some embodiments, a linker contains a protease cleavage site for a matrix metalloprotease selected from the group consisting of MMP1, MMP2, MMP-3, MMP-9, MMP-8, MMP-14, and MT1-MMP. In some embodiments, a linker contains a protease cleavage site for a caspace protease selected from the group consisting of Caspase-1, Caspase-2, Caspase-3, Caspase-4, Caspase-5, Caspase-6, Caspase-7, Caspase-8, Caspase-9, Caspase-10, Caspase-11, Caspase-12, Caspase-13, and Caspase-14. In some embodiments, a linker contains a protease cleavage site for a protease selected from the group consisting of TMPRSS3, TMPRSS4, and TMPRSS6. In some embodiments, the linker contains a protease cleavage site for a protease selected from the group consisting of TACE, human neutrophil elastase, beta-secretase, uPA, fibroblast associated protein, matriptase, PSMA and PSA.

[0329] A cleavable linker can also include a valine-citrulline peptide, a valine-alanine peptide, a phenylalanine-lysine or other peptide, such as a peptide that forms a protease recognition and cleavage site. Such a peptide-containing linker can contain a pentafluorophenyl group. A peptide-containing linker can include a succimide or a maleimide group. A peptide-containing linker can include a para aminobenzoic acid (PABA) group. A peptide-containing linker can include an aminobenzyloxycarbonyl (PABC) group. A peptide-containing linker can include a PABA or PABC group and a maleimide group. A peptide-containing linker can include a PABA or PABC group and a pentafluorophenyl group. A peptide-containing linker can include a PABA or PABC group and a succinimide group. A linker can be a (maleimidocaproyl)-(valine-alanine)-(para-aminobenzyloxycarbonyl) linker. A linker can be a (maleimidocaproyl)-(valine-citrulline)-(para-aminobenzyloxycarbonyl) linker. A linker can be a (maleimidocaproyl)-(phenylalanine-lysine)-(para-aminobenzyloxycarbonyl) linker.

[0330] A non-cleavable linker is generally protease-insensitive and insensitive to intracellular processes. A non-cleavable linker can include a maleimide group. A non-cleavable linker can include a succinimide group. A non-cleavable linker can be maleimido-alkyl-C(O)— linker. A non-cleavable linker can be maleimidocaproyl linker. A maleimidocaproyl linker can be N-maleimidomethylcyclohexane-1-carboxylate. A maleimidocaproyl linker can include a succinimide group. A maleimidocaproyl linker can include pentafluorophenyl group.

[0331] A linker can be a combination of a maleimidocaproyl group and one or more polyethylene glycol molecules. A linker can be a maleimide-PEG4 linker. A linker can be a combination of a maleimidocaproyl linker containing a succinimide group and one or more polyethylene glycol molecules. A linker can be a combination of a maleimidocaproyl linker containing a pentafluorophenyl group and one or more polyethylene glycol molecules. A linker can contain a maleimide(s) linked to polyethylene glycol molecules in which the polyethylene glycol can allow for more linker flexibility or can be used lengthen the linker.

[0332] A linker can also contain segments of alkylene, alkenylene, alkynylene, polyether, polyester, polyamide, polyamino acids, peptides, polypeptides, cleavable peptides, and/or aminobenzyl-carbamates. A linker can contain a maleimide at one end and an N-hydroxysuccinimidyl ester at the other end. A linker can contain a lysine with an N-terminal amine acetylated, and a valine-citrulline, valine-alanine or phenylalanine-lysine cleavage site. A linker can be a link created by a microbial transglutaminase, wherein the link can be created between an amine-containing moiety and a moiety engineered to contain glutamine as a result of the enzyme catalyzing a bond formation between the acyl group of a glutamine side chain and the primary amine of a lysine chain. A linker can contain a reactive primary amine. A linker can be a Sortase A linker. A Sortase A linker can be created by a Sortase A enzyme fusing an LXPTG recognition motif (SEQ ID NO: 811) to an N-terminal GGG motif to regenerate a native amide bond. The linker created can therefore link to a moiety attached to the LXPTG recognition motif (SEQ ID NO: 811) with a moiety attached to the N-terminal GGG motif. A linker can be a link created between an unnatural amino acid on one moiety reacting with oxime bond that was formed by modifying a ketone group with an alkoxyamine on another moiety. A moiety can be part of a conjugate. A moiety can be part of an antibody construct, such as an antibody. A moiety can be part of an immune-modulatory agent. A moiety can be part of a binding domain. A linker can be unsubstituted or substituted, for example, with a substituent. A substituent can include, for example, hydroxyl groups, amino groups, nitro groups, cyano groups, azido groups, carboxyl groups, carboxaldehyde groups, imine groups, alkyl groups, alkenyl groups, alkynyl groups, alkoxy groups, acyl groups, acyloxy groups, amide groups, and ester groups.

[0333] A linker can be polyvalent such that it covalently links more than one Immune-modulatory agent to a single site on the antibody construct, or monovalent such that it covalently links a single Immune-modulatory agent to a single site on the antibody construct.

[0334] Exemplary polyvalent linkers that may be used to attach many Immune-modulatory agents to an antibody construct of the conjugate are described. For example, Fleximer® linker technology has the potential to enable high-DAR conjugate with good physicochemical properties. As shown below, the Fleximer® linker technology is based on incorporating molecules into a solubilizing poly-acetal backbone via a sequence of ester bonds. The methodology renders highly-loaded conjugates (DAR up to 20) whilst maintaining good physicochemical properties. This methodology can be utilized with an immune-modulatory agent as shown in the scheme below, where Drug’ refers to the immune-modulatory agent.

[chemical structure]

[0335] To utilize the Fleximer® linker technology depicted in the scheme above, an aliphatic alcohol can be present or introduced into the Immune-modulatory agent. The alcohol moiety is then attached to an alanine moiety, which is then synthetically incorporated into the Fleximer® linker. Liposomal processing of the conjugate in vitro releases the parent alcohol-containing drug.

[0336] By way of example and not limitation, some cleavable and noncleavable linkers that may be included in the conjugates described herein are described below.

[0337] Cleavable linkers can be cleavable in vitro and in vivo. Cleavable linkers can include chemically or enzymatically unstable or degradable linkages. Cleavable linkers can rely on processes inside the cell to liberate an immune-modulatory agent, such as reduction in the cytoplasm, exposure to acidic conditions in the lysosome, or cleavage by specific proteases or other enzymes within the cell. Cleavable linkers can incorporate one or more chemical bonds that are chemically or enzymatically cleavable while the remainder of the linker can be non-cleavable.

[0338] A linker can contain a chemically labile group such as hydrazone and/or disulfide group. Linkers comprising chemically labile groups can exploit differential properties between the plasma and some cytoplasmic compartments. The intracellular conditions that can facilitate immune-modulatory agent release for hydrazine-containing linkers can be the acidic environment of endosomes and lysosomes, while disulfide-containing linkers can be reduced in the cytosol, which can contain high thiol concentrations, e.g., glutathione. The plasma stability of a linker containing a chemically labile group can be increased by introducing steric hindrance using substituents near the chemically labile group.

[0339] Acid-labile groups, such as hydrazones, can remain intact during systemic circulation in the blood's neutral pH environment (pH 7.3-7.5) and can undergo hydrolysis and can release an immune-modulatory agent once the conjugate is internalized into mildly acidic endosomal (pH 5.0-6.5) and lysosomal (pH 4.5-5.0) compartments of the cell. This pH dependent release mechanism can be associated with nonspecific release of the immune-modulatory agent. To increase the stability of the hydrazone group of the linker, the linker can be varied by chemical modification, e.g., substitution, allowing tuning to achieve more efficient release in the lysosome with a minimized loss in circulation.

[0340] Hydrazone-containing linkers can contain additional cleavage sites, such as additional acid-labile cleavage sites and/or enzymatically labile cleavage sites. Conjugates including exemplary hydrazone-containing linkers can include, for example, the following structures:

[chemical structure]

wherein D is an immune-modulatory agent and Ab is an antibody construct, respectively, and n represents the number of compound-bound linkers (LP) bound to the antibody construct. In certain linkers, such as linker (Ia), the linker can comprise two cleavable groups, a disulfide and a hydrazone moiety. For such linkers, effective release of the unmodified free immune-modulatory agent can require acidic pH or disulfide reduction and acidic pH. Linkers such as (Ib) and (Ic) can be effective with a single hydrazone cleavage site.

[0341] Other acid-labile groups that can be included in linkers include cis-aconityl-containing linkers. cis-Aconityl chemistry can use a carboxylic acid juxtaposed to an amide bond to accelerate amide hydrolysis under acidic conditions.

[0342] Cleavable linkers can also include a disulfide group. Disulfides can be thermodynamically stable at physiological pH and can be designed to release an immune-modulatory agent upon internalization inside cells, wherein the cytosol can provide a significantly more reducing environment compared to the extracellular environment. Scission of disulfide bonds can require the presence of a cytoplasmic thiol cofactor, such as (reduced) glutathione (GSH), such that disulfide-containing linkers can be reasonably stable in circulation, selectively releasing the immune-modulatory agent in the cytosol. The intracellular enzyme protein disulfide isomerase, or similar enzymes capable of cleaving disulfide bonds, can also contribute to the preferential cleavage of disulfide bonds inside cells. GSH can be present in cells in the concentration range of 0.5-10 mM compared with a significantly lower concentration of GSH or cysteine, the most abundant low-molecular weight thiol, in circulation at approximately 5 μM. Tumor cells, where irregular blood flow can lead to a hypoxic state, can result in enhanced activity of reductive enzymes and therefore even higher glutathione concentrations. The in vivo stability of a disulfide-containing linker can be enhanced by chemical modification of the linker, e.g., use of steric hindrance adjacent to the disulfide bond.

[0343] Immune-modulatory conjugates including disulfide-containing linkers can include the following structures:

[chemical structure]

wherein D is an immune-modulatory agent and Ab is an antibody construct, respectively, n represents the number of compounds bound to linkers bound to the antibody construct and R is independently selected at each occurrence from hydrogen or alkyl, for example. Increasing steric hindrance adjacent to the disulfide bond can increase the stability of the linker. Structures such as (IIa) and (IIc) can show increased in vivo stability when one or more R groups is selected from a lower alkyl such as methyl.

[0344] Another type of linker that can be used is a linker that is specifically cleaved by an enzyme. For example, the linker can be cleaved by a lysosomal enzyme. Such linkers can be peptide-based or can include peptidic regions that can act as substrates for enzymes. Peptide based linkers can be more stable in plasma and extracellular milieu than chemically labile linkers.

[0345] Peptide bonds can have good serum stability, as lysosomal proteolytic enzymes can have very low activity in blood due to endogenous inhibitors and the unfavorable pH value of blood compared to lysosomes. Release of an immune-modulatory agent from an antibody construct can occur due to the action of lysosomal proteases, e.g., cathepsin and plasmin. These proteases can be present at elevated levels in certain tumor tissues. A linker can be cleavable by a lysosomal enzyme. The lysosomal enzyme can be, for example, cathepsin B, cathepsin S, β-glucuronidase, or β-galactosidase.

[0346] The cleavable peptide can be selected from tetrapeptides such as Gly-Phe-Leu-Gly, Ala-Leu-Ala-Leu, dipeptides such as Val-Cit, Val-Ala, and Phe-Lys, or other peptides. Dipeptides can have lower hydrophobicity compared to longer peptides, depending on the composition of the peptide.

[0347] A variety of dipeptide-based cleavable linkers can be used in the immune-modulatory conjugates described herein.

[0348] Enzymatically cleavable linkers can include a self-immolative spacer to spatially separate the immune-modulatory agent from the site of enzymatic cleavage. The direct attachment of an immune-modulatory agent to a peptide linker can result in proteolytic release of the immune-modulatory agent or of an amino acid adduct of the immune-modulatory agent, thereby impairing its activity. The use of a self-immolative spacer can allow for the elimination of the fully active, chemically unmodified immune-modulatory agent upon amide bond hydrolysis.

[0349] One self-immolative spacer can be a bifunctional para-aminobenzyl alcohol group (PABA), which can link to the peptide through the amino group, forming an amide bond, while amine containing immune-modulatory agents can be attached through carbamate functionalities to the benzylic hydroxyl group of the linker (to give a p-amidobenzylcarbamate, PABC). The resulting pro-immune-modulatory agent can be activated upon protease-mediated cleavage, leading to a 1,6-elimination reaction releasing the unmodified immune-modulatory agent, carbon dioxide, and remnants of the linker. The following scheme depicts the fragmentation of p-amidobenzyl carbamate and release of the immune-modulatory agent:

[chemical structure]

wherein X-D represents the unmodified immune-modulatory agent and the carbonyl group adjacent “peptide” is part of the peptide. Heterocyclic variants of this self-immolative group have also been described.

[0350] An enzymatically cleavable linker can be a ß-glucuronic acid-based linker. Facile release of an immune-modulatory agent can be realized through cleavage of the ß-glucuronide glycosidic bond by the lysosomal enzyme ß-glucuronidase. This enzyme can be abundantly present within lysosomes and can be overexpressed in some tumor types, while the enzyme activity outside cells can be low. ß-Glucuronic acid-based linkers can be used to circumvent the tendency of an immune-modulatory conjugate to undergo aggregation due to the hydrophilic nature of ß-glucuronides. In certain embodiments, ß-glucuronic acid-based linkers can link an antibody construct to a hydrophobic immune-modulatory agent. The following scheme depicts the release of an immune-modulatory agent (D) from an immune-modulatory conjugate containing a ß-glucuronic acid-based linker:

[chemical structure]

[0351] wherein Ab indicates the antibody construct.

[0352] A variety of cleavable ß-glucuronic acid-based linkers useful for linking drugs such as auristatins, camptothecin and doxorubicin analogues, CBI minor-groove binders, and psymberin to antibodies have been described. These ß-glucuronic acid-based linkers may be used in the conjugates described herein. In certain embodiments, the enzymatically cleavable linker is a β-galactoside-based linker. β-Galactoside is present abundantly within lysosomes, while the enzyme activity outside cells is low.

[0353] Additionally, immune-modulatory agents containing a phenol group can be covalently bonded to a linker through the phenolic oxygen. One such linker relies on a methodology in which a diamino-ethane “Space Link” is used in conjunction with traditional “PABO”-based self-immolative groups to deliver phenols.

[0354] Cleavable linkers can include non-cleavable portions or segments, and/or cleavable segments or portions can be included in an otherwise non-cleavable linker to render it cleavable. By way of example only, polyethylene glycol (PEG) and related polymers can include cleavable groups in the polymer backbone. For example, a polyethylene glycol or polymer linker can include one or more cleavable groups such as a disulfide, a hydrazone or a dipeptide.

[0355] Other degradable linkages that can be included in linkers can include ester linkages formed by the reaction of PEG carboxylic acids or activated PEG carboxylic acids with alcohol groups on an immune-modulatory agent, wherein such ester groups can hydrolyze under physiological conditions to release the immune-modulatory agent. Hydrolytically degradable linkages can include, but are not limited to, carbonate linkages; imine linkages resulting from reaction of an amine and an aldehyde; phosphate ester linkages formed by reacting an alcohol with a phosphate group; acetal linkages that are the reaction product of an aldehyde and an alcohol; orthoester linkages that are the reaction product of a formate and an alcohol; and oligonucleotide linkages formed by a phosphoramidite group, including but not limited to, at the end of a polymer, and a 5′ hydroxyl group of an oligonucleotide.

[0356] A linker can contain an enzymatically cleavable peptide moiety, for example, a linker comprising structural formula (IIIa), (IIIb), (IIIc), or (IIId):

[chemical structure]

or a salt thereof, wherein: “peptide” represents a peptide (illustrated in N→C orientation, wherein peptide includes the amino and carboxy “termini”) that is cleavable by a lysosomal enzyme; T represents a polymer comprising one or more ethylene glycol units or an alkylene chain, or combinations thereof; R^{a} is selected from hydrogen, alkyl, sulfonate and methyl sulfonate; R^{y} is hydrogen or C₁₋₄ alkyl-(O)ᵣ—(C₁₋₄ alkylene)ₛ-G¹ or C₁₋₄ alkyl-(N)—[(C₁₋₄ alkylene)-G₁]₂; R^{z} is C₁₋₄ alkyl-(O)ᵣ—(C₁₋₄ alkylene)ₛ-G²; G¹ is SO₃H, CO₂H, PEG 4-32, or a sugar moiety; G² is SO₃H, CO₂H, or a PEG 4-32 moiety; r is 0 or 1; s is 0 or 1; p is an integer ranging from 0 to 5; q is 0 or 1; x is 0 or 1; y is 0 or 1; [symbol] represents the point of attachment of the linker to an immune-modulatory agent; and * represents the point of attachment to the remainder of the linker.

[0357] In certain embodiments, the peptide can be selected from natural amino acids, unnatural amino acids or combinations thereof. In certain embodiments, the peptide can be selected from a tripeptide or a dipeptide. In particular embodiments, the dipeptide can comprise L-amino acids and be selected from: Val-Cit; Cit-Val; Ala-Ala; Ala-Cit; Cit-Ala; Asn-Cit; Cit-Asn; Cit-Cit; Val-Glu; Glu-Val; Ser-Cit; Cit-Ser; Lys-Cit; Cit-Lys; Asp-Cit; Cit-Asp; Ala-Val; Val-Ala; Phe-Lys; Lys-Phe; Val-Lys; Lys-Val; Ala-Lys; Lys-Ala; Phe-Cit; Cit-Phe; Leu-Cit; Cit-Leu; Ile-Cit; Cit-Ile; Phe-Arg; Arg-Phe; Cit-Trp; and Trp-Cit, or salts thereof.

[0358] Exemplary embodiments of linkers according to structural formula (IIIa) are illustrated below (as illustrated, the linkers include a reactive group suitable for covalently attaching a linker to an antibody construct):

[chemical structure]

[chemical structure]

wherein [symbol] indicates an attachment site of a linker to an immune-modulatory agent.

[0359] Exemplary embodiments of linkers according to structural formula (IIIb), (IIIc), or (IIId) that can be included in the conjugates described herein can include the linkers illustrated below (as illustrated, the linkers can include a reactive group suitable for covalently linking the linker to an antibody construct):

[chemical structure]

[chemical structure]

[chemical structure]

[chemical structure]

[chemical structure]

[chemical structure]

wherein [symbol] indicates an attachment site to an immune-modulatory agent.

[0360] The linker can contain an enzymatically cleavable sugar moiety, for example, a linker comprising structural formula (IVa), (IVb), (IVc), (IVd), or (IVe):

[chemical structure]

[chemical structure]

or a salt thereof, wherein: q is 0 or 1; r is 0 or 1; X¹ is CH₂, O or NH; [symbol] represents the point of attachment of the linker to an immune-modulatory agent; and * represents the point of attachment to the remainder of the linker.

[0361] Exemplary embodiments of linkers according to structural formula (IVa) that may be included in the immune-modulatory conjugates described herein can include the linkers illustrated below (as illustrated, the linkers include a group suitable for covalently linking the linker to an antibody construct):

[chemical structure]

[chemical structure]

[chemical structure]

wherein [symbol] represents the point of attachment of a linker to an immune-modulatory agent.

[0362] Exemplary embodiments of linkers according to structural formula (IVb) that may be included in the conjugates described herein include the linkers illustrated below (as illustrated, the linkers include a group suitable for covalently linking the linker to an antibody construct):

[chemical structure]

[chemical structure]

[chemical structure]

wherein [symbol] represents the point of attachment of a linker to an immune-modulatory agent.

[0363] Exemplary embodiments of linkers according to structural formula (IVc) that may be included in the conjugates described herein include the linkers illustrated below (as illustrated, the linkers include a group suitable for covalently linking the linker to an antibody construct):

[chemical structure]

[chemical structure]

[chemical structure]

wherein [symbol] represents the point of attachment of a linker to an immune-modulatory agent.

[0364] Exemplary embodiments of linkers according to structural formula (IVd) that may be included in the conjugates described herein include the linkers illustrated below (as illustrated, the linkers include a group suitable for covalently attaching a linker to an antibody construct):

[chemical structure]

[chemical structure]

wherein [symbol] represents the point of attachment of a linker to an immune-modulatory agent.

[0365] Exemplary embodiments of linkers according to structural formula (IVe) that may be included in the conjugates described herein include the linkers illustrated below (as illustrated, the linkers include a group suitable for covalently attaching the linker to an antibody construct):

[chemical structure]

wherein [symbol] represents the point of attachment of a linker to an immune-modulatory agent.

[0366] Although cleavable linkers can provide certain advantages, the linkers comprising the conjugate described herein need not be cleavable. For non-cleavable linkers, the immune-modulatory agent release may not depend on the differential properties between the plasma and some cytoplasmic compartments. The release of the immune-modulatory agent can occur after internalization of the immune-modulatory conjugate via antigen-mediated endocytosis and delivery to lysosomal compartment, where the antibody construct can be degraded to the level of amino acids through intracellular proteolytic degradation. This process can release an immune-modulatory agent derivative, which is formed by the immune-modulatory agent, the linker, and the amino acid residue or residues to which the linker was covalently attached. The immune-modulatory agent derivative from immune-modulatory conjugates with non-cleavable linkers can be more hydrophilic and less membrane permeable, which can lead to less bystander effects and less nonspecific toxicities compared to immune-modulatory conjugates with a cleavable linker. Immune-modulatory conjugates with non-cleavable linkers can have greater stability in circulation than immune-modulatory conjugates with cleavable linkers. Non-cleavable linkers can include alkylene chains, or can be polymeric, such as, for example, based upon polyalkylene glycol polymers, amide polymers, or can include segments of alkylene chains, polyalkylene glycols and/or amide polymers. The linker can contain a polyethylene glycol segment having from 1 to 6 ethylene glycol units.

[0367] The linker can be non-cleavable in vivo, for example, a linker according to the formulations below:

[chemical structure]

or salts thereof, wherein: R^{a} is selected from hydrogen, alkyl, sulfonate and methyl sulfonate; R^{x} is a reactive moiety including a functional group capable of covalently linking the linker to an antibody construct; and [symbol] represents the point of attachment of the linker to an immune-modulatory agent.

[0368] Exemplary embodiments of linkers according to structural formula (Va)-(Vf) that may be included in the conjugates described herein include the linkers illustrated below (as illustrated, the linkers include a group suitable for covalently linking the linker to an antibody construct, and [symbol] represents the point of attachment of the linker to an immune-modulatory agent:

[chemical structure]

[0369] Attachment groups that are used to attach the linkers to an antibody construct can be electrophilic in nature and include, for example, maleimide groups, alkynes, alkynoates, allenes and allenoates, activated disulfides, active esters such as NHS esters and HOBt esters, haloformates, acid halides, alkyl, and benzyl halides such as haloacetamides. There are also emerging technologies related to “self-stabilizing” maleimides and “bridging disulfides” that can be used in accordance with the disclosure.

[0370] Maleimide groups are frequently used in the preparation of conjugates because of their specificity for reacting with thiol groups of, for example, cysteine groups of the antibody of a conjugate. The reaction between a thiol group of an antibody and a drug with a linker including a maleimide group proceeds according to the following scheme:

[chemical structure]

[0371] The reverse reaction leading to maleimide elimination from a thio-substituted succinimide may also take place. This reverse reaction is undesirable as the maleimide group may subsequently react with another available thiol group such as other proteins in the body having available cysteines. Accordingly, the reverse reaction can undermine the specificity of a conjugate. One method of preventing the reverse reaction is to incorporate a basic group into the linking group shown in the scheme above. Without wishing to be bound by theory, the presence of the basic group may increase the nucleophilicity of nearby water molecules to promote ring-opening hydrolysis of the succinimide group. The hydrolyzed form of the attachment group is resistant to deconjugation in the presence of plasma proteins. So-called “self-stabilizing” linkers provide conjugates with improved stability. A representative schematic is shown below:

[chemical structure]

[0372] The hydrolysis reaction schematically represented above may occur at either carbonyl group of the succinimide group. Accordingly, two possible isomers may result, as shown below:

[chemical structure]

[0373] The identity of the base as well as the distance between the base and the maleimide group can be modified to tune the rate of hydrolysis of the thio-substituted succinimide group and optimize the delivery of a conjugate to a target by, for example, improving the specificity and stability of the conjugate.

[0374] Bases suitable for inclusion in a linker described herein, e.g., any linker described herein with a maleimide group prior to conjugating to an antibody construct, may facilitate hydrolysis of a nearby succinimide group formed after conjugation of the antibody construct to the linker. Bases may include, for example, amines (e.g., —N(R²⁶)(R²⁷), where R²⁶ and R²⁷ are independently selected from H and C₁₋₆ alkyl), nitrogen-containing heterocycles (e.g., a 3- to 12-membered heterocycle including one or more nitrogen atoms and optionally one or more double bonds), amidines, guanidines, and carbocycles or heterocycles substituted with one or more amine groups (e.g., a 3- to 12-membered aromatic or non-aromatic cycle optionally including a heteroatom such as a nitrogen atom and substituted with one or more amines of the type —N(R²⁶)(R²⁷), where R²⁶ and R²⁷ are independently selected from H or C₁₋₆ alkyl). A basic unit may be separated from a maleimide group by, for example, an alkylene chain of the form —(CH₂)ₘ—, where m is an integer from 0 to 10. An alkylene chain may be optionally substituted with other functional groups as described herein.

[0375] A linker described herein with a maleimide group may include an electron withdrawing group such as, but not limited to, —C(O)R, ═O, —CN, —NO₂, —CX₃, —X, —COOR, —CONR₂, —COR, —COX, —SO₂R, —SO₂OR, —SO₂NHR, —SO₂NR₂, PO₃R₂, —P(O)(CH₃)NHR, —NO, —NR₃⁺, —CR═CR₂, and —C≡CR, where each R is independently selected from H and C₁₋₆ alkyl and each X is independently selected from F, Br, Cl, and I. Self-stabilizing linkers may also include aryl, e.g., phenyl, or heteroaryl, e.g., pyridine, groups optionally substituted with electron withdrawing groups such as those described herein.

[0376] Examples of self-stabilizing linkers are provided in, e.g., U.S. Patent Publication Number 2013/0309256, the linkers of which are incorporated by reference herein. It will be understood that a self-stabilizing linker useful in conjunction with immune-modulatory agents may be equivalently described as unsubstituted maleimide-including linkers, thio-substituted succinimide-including linkers, or hydrolyzed, ring-opened thio-substituted succinimide-including linkers.

[0377] In certain embodiments, a linker comprises a stabilizing linker moiety selected from:

[chemical structure]

[0378] In the scheme provided above, the bottom structure may be referred to as (maleimido)-DPR-Val-Cit-PAB, where DPR refers to diaminopropinoic acid, Val refers to valine, Cit refers to citrulline, and PAB refers to para-aminobenzylcarbonyl. [symbol] represents the point of attachment to an immune-modulatory agent.

[0379] A method for bridging a pair of sulfhydryl groups derived from reduction of a native hinge disulfide bond has been disclosed and is depicted in the schematic below. An advantage of this methodology is the ability to synthesize homogenous DAR4 conjugates by full reduction of IgGs (to give 4 pairs of sulfhydryls from interchain disulfides) followed by reaction with 4 equivalents of the alkylating agent. Conjugates containing “bridged disulfides” are also claimed to have increased stability.

[chemical structure]

[0380] Similarly, as depicted below, a maleimide derivative that is capable of bridging a pair of sulfhydryl groups has been developed.

[chemical structure]

[0381] A linker can contain the following structural formulas (VIa), (VIb), or (VIc):

[chemical structure]

or salts thereof, wherein: R^{q} is H or —O—(CH₂CH₂O)₁₁—CH₃; x is 0 or 1; y is 0 or 1; G² is —CH₂CH₂CH₂SO₃H or —CH₂CH₂O—(CH₂CH₂O)₁₁—CH₃; R^{w} is —O—CH₂CH₂SO₃H or —NH(CO)—CH₂CH₂O—(CH₂CH₂O)₁₂—CH₃; and * represents the point of attachment to the remainder of the linker.

[0382] Exemplary embodiments of linkers according to structural formula (VIa) and (VIb) that can be included in the conjugates described herein can include the linkers illustrated below (as illustrated, the linkers can include a group suitable for covalently linking the linker to an antibody construct):

[chemical structure]

[chemical structure]

[chemical structure]

wherein [symbol] represents the point of attachment of the linker to an immune-modulatory agent.

[0383] Exemplary embodiments of linkers according to structural formula (VIc) that can be included in the immune-modulatory conjugates described herein can include the linkers illustrated below (as illustrated, the linkers can include a group suitable for covalently attaching the linker to an antibody construct):

[chemical structure]

[chemical structure]

wherein [symbol] represents the point of attachment of the linker to an immune-modulatory agent.

### Conjugates

[0384] A conjugate as described herein includes an antibody construct and at least one linker attached to at least one immune-modulatory agent. In some aspects, a conjugate comprises an an antibody construct, at least one immune-modulatory agent, and at least one linker attaching the immune-modulatory agent to the antibody construct. In some embodiments, the linker contains a protease cleavage site specifically cleaved by a protease that is present in the extracellular portion of the disease microenvironment. A cleavable linker can contain protease cleavage site for a protease that is over-expressed in the disease microenvironment. Cleavage of the protease cleavage site allows selective release of the immune-modulatory agent in the disease. In some embodiments, a conjugate includes an engineered Fc domain for selective delivery of an immune-modulatory agent(s), based on the binding of the Fc domain to Fc receptors on the target cells, such as immune cells.

[0385] In some embodiments, an immune-modulatory conjugate comprises: (a) an antibody construct comprising an antigen binding domain and an Fc domain, the antigen binding domain specifically binding to an antigen expressed on a plurality of target cells; (b) at least one immune-modulatory agent; and (c) at least one linker, each linker being covalently attached to the antibody construct and to at least one immune-modulatory agent. The conjugate further comprises one or all of the following: (i) the antigen binding domain specifically binds to an antigen expressed in the extracellular microenvironment of a target disease, the linker is a cleavable linker having a protease cleavage site cleavable by a protease that is preferentially present in the extracellular microenvironment, and cleavage of the protease cleavage site releases an active form of the immune-modulatory agent; or (ii) the Fc domain comprises an amino acid sequence having a Kd for a first Fc receptor that is at least 10 fold higher than a Kd of the amino acid sequence for a wild-type IgG1 Fc domain for the first Fc receptor and having a Kd for a second F receptor that is the same or lower than a Kd of the amino acid sequence for a wild-type IgG1 Fc domain for the second Fc receptor, thereby allowing the Fc domain to preferentially bind to cells expressing the second Fc receptor; or (iii) both (i) and (ii).

[0386] In some embodiments, the immune-modulatory conjugate is represented by the following formula:

[chemical structure]

[0387] wherein:

[0388] A is the antibody construct having the antigen binding domain and the Fc domain;

[0389] L is the linker;

[0390] Dx is the immune-modulatory agent;

[0391] n is selected from 1 to 20; and

[0392] z is selected from 1 to 20.

[0393] In some embodiments, n is from 1 to 5 and z is from 1 to 8, n is 1 and z is from 1 to 8, or n is 1 and z is from 1 to 5.

[0394] In some embodiments, the linker has the following formula:

Rx-An-protease cleavage site-Y_{y}—,

[0395] wherein Rx is a reactive moiety attached to the antibody construct,

[0396] A is a stretcher unit and n is 0 or 1, and

[0397] Y is a self immolative unit and y is 0, 1, or 2.

Rx can be, for example, a succinimide group or a hydrolyzed succinmide group. In some embodiments, Y is a self-immolative group. A self-immolative group can be, for example, a PABA or PABC group. The linker can be, for example, maleimidocaproyl-protease cleave site-PABC-.

[0398] In some embodiments, the linker is a cleavable linker having a protease cleavage site cleavable by a protease that is preferentially present in the extracellular microenvironment of the target cells, whereby cleavage of the protease cleavage site releases an active form of the immune-modulatory agent in the extracellular microenvironment.

[0399] In some embodiments, the linker contains a protease-cleavage site for a protease selected from the group consisting of TMPRSS3, TMPRSS4, TMPRSS6, MMP1, MMP2, MMP-3, MMP-9, MMP-8, MMP-14, MT1-MMP, CATHEPSIN D, CATHEPSIN K, CATHEPSIN S, ADAM10, ADAM12, ADAMTS, Caspase-1, Caspase-2, Caspase-3, Caspase-4, Caspase-5, Caspase-6, Caspase-7, Caspase-8, Caspase-9, Caspase-10, Caspase-11, Caspase-12, Caspase-13, Caspase-14, TACE, human neutrophil elastase, beta-secretase, uPA, fibroblast associated protein, matriptase, PSMA and PSA. In some embodiments, the protease cleavage site is selected from a site cleavable by a protease selected from the group consisting of legumain, plasmin, TMPRSS3, TMPRSS4, TMPRSS6, MMP1, MMP2, MMP-3, MMP-9, MMP-8, MMP-14, MT1-MMP, CATHEPSIN D, CATHEPSIN K, CATHEPSIN S, ADAM10, ADAM12, ADAMTS, Caspase-1, Caspase-2, Caspase-3, Caspase-4, Caspase-5, Caspase-6, Caspase-7, Caspase-8, Caspase-9, Caspase-10, Caspase-11, Caspase-12, Caspase-13, Caspase-14, TACE, human neutrophil elastase, beta-secretase, uPA, fibroblast associated protein, matriptase, PSMA and PSA. In some embodiments, the protease is selected from one of the groups consisting of: Legumain and plasmin; TMPRSS3, TMPRSS4, and TMPRSS6; MMP1, MMP2, MMP-3, MMP-9, MMP-8, MMP-14, and MT1-MMP; CATHEPSIN D, CATHEPSIN K, and CATHEPSIN S; ADAM10, ADAM12 and ADAMTS; Caspase-1, Caspase-2, Caspase-3, Caspase-4, Caspase-5, Caspase-6, Caspase-7, Caspase-8, Caspase-9, Caspase-10, Caspase-11, Caspase-12, Caspase-13, and Caspase-14; and TACE, human neutrophil elastase, beta-secretase, uPA, fibroblast associated protein, matriptase, PSMA and PSA.

[0400] In some embodiments, the protease is preferentially localized in the extracellular microenvironment of the target cells. As used herein, preferential localization of a protease in an extracellular microenvironment refers to the increased presence of an active or activatable form of the protease in the vicinity of the target cells associated with a disease to be treated, such that the protease can cleave the protease cleavage site and release an active form of the immune-modulatory agent upon antigen binding by the conjugate, as compared to the amount of protease in an extracellular environment of normal cells (i.e., cells not associated with the disease. For example, tumor cells may express certain proteases on the cell surface or release them into the extracellular microenvironment, thereby selectively increasing the local amount of the protease, as compared to the extracellular microenvironment of normal (non-cancerous cells). Cells associated with other disease states involving significant remodeling may similarly have a localized increased amount of a protease in the extracellular microenvironment, as compared to the extracellular microenvironment of normal cells. Preferential localization of a protease in an extracellular environment can be determined, for example, as shown in Example 2.

[0401] In some embodiments, the protease is preferentially localized in the extracellular microenvironment of the target cells as compared to the extracellular microenvironment of normal cells by a factor of at least 5:1, 10:1, 25:1, 50:1 or 100:1. In some embodiments, the active form of the immune-modulatory agent is preferentially released in the extracellular microenvironment as compared to the extracellular microenvironment of normal cells by a factor of at least 5:1, 10:1, 25:1, 50:1 or 100:1.

[0402] In some embodiments, the Fc domain comprises an amino acid sequence having a Kd for a first Fc receptor that is at least 10 fold higher than a Kd of the amino acid sequence for a wild-type IgG1 Fc domain for the first Fc receptor and having a Kd for a second F receptor that is the same or lower than a Kd of the amino acid sequence for a wild-type IgG1 Fc domain for the second Fc receptor, thereby allowing the Fc domain to preferentially bind to cells expressing the second Fc receptor.

[0403] For example, the first Fc receptor can be an Fcγ receptor, such as an FcγRI, FcγRIIA, FcγRIIB, FcγRIIIA, or FcγRIIIB receptor and the second Fc receptor can an FcRn receptor. The Fc domain has an amino acid sequence that binds to the Fcγ receptor with a lower binding affinity (higher Kd) than the binding affinity (Kd) of a wildtype Fc domain that binds to the Fcγ receptor. The Fc domain has a binding affinity for an FcRn receptor that is the same or higher (lower Kd) as compared to the binding affinity of a wildtype Fc domain for the FcRn receptor. The wildtype Fc domain is typically of the same isotype as the Fc domain of the antibody construct for purposes of comparison. For example, if the Fc domain of the antibody construct is from an IgG1 or derived from an IgG1, the comparator Fc domain is a corresponding IgG1 Fc domain.

[0404] In some embodiments, the first Fc receptor is an FcγRI receptor and the second receptor is an FcRn receptor. In some embodiments, the first Fc receptor is an FcγRIIA receptor and the second receptor is an FcRn receptor. In some embodiments, the first Fc receptor is an FcγRIIB receptor and the second receptor is an FcRn receptor. In some embodiments, the first Fc receptor is an FcγRIIIA receptor and the second receptor is an FcRn receptor. In some embodiments, the first Fc receptor is an FcγRIIIB receptor and the second receptor is an FcRn receptor.

[0405] In some embodiments, the first Fc receptor is an FcRn receptor and the second receptor is an FcγRI receptor. In some embodiments, the first Fc receptor is an FcRn receptor and the second receptor is an FcγRIIA receptor. In some embodiments, the first Fc receptor is an FcRn receptor and the second receptor is an FcγRIIB receptor. In some embodiments, the first Fc receptor is an FcRn receptor and the second receptor is an FcγRIIIA receptor. In some embodiments, the first Fc receptor is an FcRn receptor and the second receptor is an FcγRIIIB receptor.

[0406] In some embodiments, the Kd of the Fc domain for the FcRn receptor is at least 5 fold lower than the Kd of a wild-type IgG1 Fc domain for the FcRn receptor. In some embodiments, an immune-modulatory conjugate can selectively deliver at least five times, at least ten times or at least 20 times as much immune-modulatory agent to cells expressing the second receptor, as compared to a conjugate having a wildtype Fc domain (e.g., a wildtype IgG1 Fc domain). For example, in some embodiments, the immune-modulatory conjugate having decreased binding affinity (increased kd) for one or more Fcγ receptors can selectively deliver at least five times, at least ten times or at least 20 times as much immune-modulatory agent to dendritic cells, as compared to a conjugate having a wildtype Fc domain (e.g., a wildtype IgG1 Fc domain).

[0407] In some embodiments, such an immune modulatory conjugate comprises a non-cleavable linker(s) attaching the immune-modulatory agent(s) to the antibody construct. For example, non-cleavable linkers having formulae Va-Vf, as described herein can be used. In some embodments, a non-cleavable linker is a substituted maleimidyl-alkylene group.

[0408] In other embodiments, such an immune modulatory conjugate comprises a cleavable linker(s) attaching the immune-modulatory agent(s) to the antibody construct, such as the linkers having formula I-IV and VI, as described herein. For example, a cleavable linker can further include one or more of the following groups: a succimide group, a hydrolyzed succimide group, a PABA group, a PABC group, and/or one or more polyethylene glycol molecules. A linker can be a (maleimidocaproyl)-(protease cleavage site)-(para-aminobenzyloxycarbonyl) linker prior to attachment to the antibody construct. A linker can contain a maleimide at one end, a protease cleavage site and an N-hydroxysuccinimidyl ester at the other end, prior to attachment to the antibody construct. A linker can contain a lysine with an N-terminal amine acetylated, and a protease cleavage site. A linker can be a link created by a microbial transglutaminase, wherein the link is created between an amine-containing moiety and a moiety engineered to contain glutamine as a result of the enzyme catalyzing a bond formation between the acyl group of a glutamine side chain and the primary amine of a lysine chain. A linker can contain a reactive primary amine. A linker can be a Sortase A linker. A Sortase A linker can be created by a Sortase A enzyme fusing an LXPTG recognition motif (SEQ ID NO: 811) to an N-terminal GGG motif to regenerate a native amide bond. The linker created can therefore link a moiety attached to the LXPTG recognition motif (SEQ ID NO: 811) with a moiety attached to the N-terminal GGG motif. A linker can be a link created between an unnatural amino acid on one moiety reacting with oxime bond that was formed by modifying a ketone group with an alkoxyamine on another moiety. A moiety can be a portion of an antibody construct. A moiety can be a binding domain. A moiety can be a portion of an antibody. A moiety can be an immune-modulatory agent.

[0409] In some embodiments, an immune-modulatory conjugate comprises an antibody construct, at least one pattern recognition receptor (PRR) agonist, and at least one linker. In some embodiments, an immune-modulatory conjugate comprises an antibody construct, at least one pattern-associated molecular pattern (PAMP) molecule, and at least one linker. In some embodiments, an immune-modulatory conjugate comprises an antibody construct, at least one damage-associated molecular pattern (DAMP) molecule, and at least one linker.

[0410] In some embodiments, an immune-modulatory conjugate comprises an antibody construct, at least one TLR2 agonist, and at least one linker. In some embodiments, an immune-modulatory conjugate comprises an antibody construct, at least one TLR3 agonist, and at least one linker. In some embodiments, an immune-modulatory conjugate comprises an antibody construct, at least one TLR4 agonist, and at least one linker. In some embodiments, an immune-modulatory conjugate comprises an antibody construct, at least one TLR5 agonist, and at least one linker. In some embodiments, an immune-modulatory conjugate comprises an antibody construct, at least one TLR6 agonist, and at least one linker. In some embodiments, an immune-modulatory conjugate comprises an antibody construct, at least one TLR7 agonist, and at least one linker. In some embodiments, an immune-modulatory conjugate comprises an antibody construct, at least one TLR8 agonist, and at least one linker. In some embodiments, an immune-modulatory conjugate comprises an antibody construct, at least one TLR9 agonist, and at least one linker. In some embodiments, an immune-modulatory conjugate comprises an antibody construct, at least one TLR10 agonist, and at least one linker. In some embodiments, an immune-modulatory conjugate comprises an antibody construct, at least one STING agonist, and at least one linker. In some embodiments, an immune-modulatory conjugate comprises an antibody construct, at least one RIG-I ligand, and at least one linker. In some embodiments, an immune-modulatory conjugate comprises an antibody construct, at least one least NOD-like receptor ligand, and at least one linker.

[0411] An antigen binding domain(s) of a conjugate can be specifically bind to a tumor antigen, or an antigen on cells associated with a fibrotic or inflammatory disease.

[0412] In some embodiments, an antigen binding domain(s) specifically binds to a tumor antigen. The tumor antigen can be selected from, for example, GD2, GD3, GM2, Le^{y}, sLe, polysialic acid, fucosyl GM1, Tn, STn, BM3, or GloboH, or from CD5, CD19, CD20, CD25, CD37, CD30, CD33, CD45, CAMPATH-1, BCMA, CS-1, PD-L1, B7-H3, B7-DC (PD-L2), HLA-DR, carcinoembryonic antigen (CEA), TAG-72, MUC1, MUC15, MUC16, folate-binding protein, A33, G250, prostate-specific membrane antigen (PSMA), CA-125, CA19-9, epidermal growth factor, HER2, IL-2 receptor, EGFRvIII (de2-7 EGFR), EGFR, fibroblast activation protein (FAP), tenascin, a metalloproteinase, endosialin, vascular endothelial growth factor, αvβ3, WT1, LMP2, HPV E6, HPV E7, p53 nonmutant, NY-ESO-1, GLP-3, MelanA/MART1, Ras mutant, gp100, p53 mutant, PR1, bcr-abl, tyrosinase, survivin, PSA, hTERT, STN1, TNC, a Sarcoma translocation breakpoint fusion protein, EphA2, PAP, ML-IAP, AFP, ERG, NA17, PAX3, ALK, androgen receptor, cyclin B1, MYCN, RhoC, TRP-2, mesothelin (MSLN), PSCA, MAGE A1, MAGE-A3, CYP1B1, PLAV1, BORIS, Tn, ETV6-AML, NY-BR-1, RGS5, SART3, Carbonic anhydrase IX, PAX5, OY-TES1, Sperm protein 17, LCK, MAGE C2, MAGE A4, GAGE, TRAIL1, HMWMAA, AKAP-4, SSX2, XAGE 1, B7H3, Legumain, Tie 3, PAGE4, VEGFR2, MAD-CT-1, PDGFR-B, MAD-CT-2, ROR2, CMET, HER3, EPCAM, CA6, NAPI2B, TROP2, Claudin-6 (CLDN6), Claudin-16 (CLDN16), CLDN18.2, RON, LY6E, FRA, DLL3, PTK7, Uroplakin-1B (UPK1B), LIV1, ROR1, STRA6, TMPRSS3, TMPRSS4, TMEM238, Clorf186, Fos-related antigen 1, VEGFR1, endoglin, VTCN1 (B7-H4), VISTA, or a fragment thereof.

[0413] In certain embodiments, an antigen binding domain specifically binds to a tumor antigen, such as those selected from CD5, CD25, CD37, CD33, CD45, BCMA, CS-1, PD-L1, B7-H3, B7-DC (PD-L2), HLD-DR, carcinoembryonic antigen (CEA), TAG-72, EpCAM, MUC1, folate-binding protein (FOLR1), A33, G250 (carbonic anhydrase IX), prostate-specific membrane antigen (PSMA), GD2, GD3, GM2, Ley, CA-125, CA19-9 (MUC1 sLe(a)), epidermal growth factor, HER2, IL-2 receptor, EGFRvIII (de2-7 EGFR), fibroblast activation protein (FAP), a tenascin, a metalloproteinase, endosialin, avB3, LMP2, EphA2, PAP, AFP, ALK, polysialic acid, TRP-2, fucosyl GM1, mesothelin (MSLN), PSCA, sLe(a), GM3, BORIS, Tn, TF, GloboH, STn, CSPG4, AKAP-4, SSX2, Legumain, Tie 2, Tim 3, VEGFR2, PDGFR-B, ROR2, TRAIL1, MUC16, EGFR, CMET, HER3, MUC1, MUC15, CA6, NAPI2B, TROP2, CLDN18.2, RON, LY6E, FRAlpha, DLL3, PTK7, LIV1, ROR1, CLDN6, GPC3, ADAM12, LRRC15, CDH6, TMEFF2, TMEM238, GPNMB, ALPPL2, UPK1B, UPK2, LAMP-1, LY6K, EphB2, STEAP, ENPP3, CDH3, Nectin4, LYPD3, EFNA4, GPA33, SLITRK6 or HAVCR1.

[0414] In certain embodiments, an antigen binding domain specifically binds to an antigen associated with fibrotic or inflammatory disease, such as those selected from Cadherin 11, PDPN, LRRC15, Integrin α4β7, Integrin α2β1, MADCAM, Nephrin, Podocin, IFNAR1, BDCA2, CD30, c-KIT, FAP, CD73, CD38, PDGFRβ, Integrin αvβ1, Integrin αvβ3, Integrin αvβ8, GARP, Endosialin, CTGF, Integrin αvβ6, CD40, PD-1, TIM-3, TNFR2, DEC205, DCIR, CD86, CD45RB, CD45RO, MHC Class II, CD25, LRRC15, MMP14, GPX8, and F2RL2.

[0415] An immune-modulatory conjugate can recognize a single antigen. In other embodiments, a conjugate can recognize two or more antigens. In some embodiments, a conjugate can recognize three or more antigens. In some embodiments, the binding affinity (Kd) for binding of a first antigen binding domain of a conjugate to an antigen in the presence of an immune-modulatory agent (i.e, when the immune-modulatory agent(s) are attached to the antibody construct via a linker(s)) can be about 2 times, about 3 times, about 4 times, about 5 times, about 6 times, about 7 times, about 8 times, about 9 times, about 10 times, about 15 times, about 20 times, about 25 times, about 30 times, about 35 times, about 40 times, about 45 times, about 50 times, about 60 times, about 70 times, about 80 times, about 90 times, about 100 times, about 110 times, or about 120 times greater than the Kd for binding of the first binding domain to the antigen in the absence of the immune-modulatory agent (i.e., the antibody construct alone). In some embodiments, the binding affinity (Kd) for binding of a first antigen binding domain of a conjugate to an antigen in the presence of the immune-modulatory agent (i.e, when the immune-modulatory agent(s) are attached to the antibody construct via a linker(s)) can be less than 10 nM. In some embodiments, the binding affinity (Kd) for binding of a first antigen binding domain of a conjugate to an antigen in the presence of the immune-modulatory agent can be less than 100 nM, less than 50 nM, less than 20 nM, less than 5 nM, less than 1 nM, or less than 0.1 nM.

[0416] In some embodiments, the binding affinity (Kd) for binding of a second antigen binding domain of a conjugate to an antigen in the presence of an immune-modulatory agent can be about 2 times, about 3 times, about 4 times, about 5 times, about 6 times, about 7 times, about 8 times, about 9 times, about 10 times, about 15 times, about 20 times, about 25 times, about 30 times, about 35 times, about 40 times, about 45 times, about 50 times, about 60 times, about 70 times, about 80 times, about 90 times, about 100 times, about 110 times, or about 120 times greater than the Kd for binding of the second antigen binding domain to the antigen in the absence of the immune-modulatory agent (i.e., the antibody construct alone). In some embodiments, the binding affinity (Kd) for binding of a second antigen binding domain of a conjugate to an antigen in the presence of the immune-modulatory agent can be less than 10 nM. In some embodiments, the binding affinity (Kd) for binding of a second antigen binding domain of a conjugate to an antigen in the presence of the immune-modulatory agent can be less than 100 nM, less than 50 nM, less than 20 nM, less than 5 nM, less than 1 nM, or less than 0.1 nM.

[0417] In some embodiments, an immune-modulatory conjugate comprises one or more antigen binding domains, typically two antigen binding domains, that specifically bind to an antigen, such as a tumor antigen or an antigen on cells associated with a fibrotic or an inflammatory disease. In some embodiments, an immune-modulatory conjugate comprises one or more antigen binding domains, typically two antigen binding domains, that specifically bind to an antigen, such as a tumor antigen or an antigen on cells associated with a fibrotic or an inflammatory disease, and further comprises an antigen binding domain(s) that specifically binds to an antigen on an immune cells. In some embodiments, an immune-modulatory conjugate comprises one or more antigen binding domains, typically two antigen binding domains, that specifically bind to an antigen, such as an antigen expressed on an immune cell. An immune cell can be an antigen-presenting cell, such as a dendritic cell, a macrophage or a monocyte. An immune cell can be an antigen-presenting cell, such as a dendritic cell, a macrophage, a monocyte, or a B cell. An immune cell can be a T cell, a B cell, an NKT cell, or an NK cell.

[0418] In some embodiments, the Fc domain of the antibody construct of the conjugate can be a modified Fc domain that has a modified binding affinity for an Fc receptor, as described herein. The modified Fc domain can comprise a substitution at more than one amino acid residue, as described herein. The Kd for binding of an Fc domain to an Fc receptor can be about 2 times, about 3 times, about 4 times, about 5 times, about 6 times, about 7 times, about 8 times, about 9 times, about 10 times, about 15 times, about 20 times, about 25 times, about 30 times, about 35 times, about 40 times, about 45 times, about 50 times, about 60 times, about 70 times, about 80 times, about 90 times, about 100 times, about 110 times, or about 120 times greater than the Kd for binding of a wildtype Fc domain to the Fc receptor. The Kd for binding of an Fc domain to an Fc receptor can be less than 10 nM. The Kd for binding of an Fc domain to an Fc receptor can be less than 100 nM, less than 50 nM, less than 20 nM, less than 5 nM, less than 1 nM, or less than 0.1 nM.

[0419] A linker can be attached to an antibody construct of a conjugate by a direct linkage between the antibody construct and the linker. A direct linkage is a covalent bond. A linker can be attached to an antibody construct at any suitable site, such as for example at a terminus of an amino acid sequence or at a side chain of a cysteine residue, an engineered cysteine residue, a lysine residue, a serine residue, a threonine residue, a tyrosine residue, an aspartic acid residue, a glutamic acid residue, a glutamine residue, an engineered glutamine residue, a selenocysteine residue, or a non-natural amino acid. Non-natural amino acids can include para-azidomethyl-1-phenylalanine (pAMF). An attachment site can also be at a residue containing an oxime bond that was formed by modifying a ketone group with an alkoxyamine on another moiety, and a reactive primary amine, such as a reactive primary amine at a C-terminal end of a protein or peptide, such as by using Sortase A linker, which can be created by a Sortase A enzyme fusing an LXPTG recognition motif (SEQ ID NO: 811) to an N-terminal GGG motif to regenerate a native amide bond. The linker created can therefore link a moiety attached to the LXPTG recognition motif (SEQ ID NO: 811) with a moiety attached to the N-terminal GGG motif.

[0420] An attachment can be via any of a number of types of bonds, for example but not limited to, an amide bond, an ester bond, an ether bond, a carbon-nitrogen bond, a carbon-carbon single, double or triple bond, a disulfide bond, or a thioether bond. A linker can have at least one functional group, which can be linked to the antibody construct or the antibody. Non-limiting examples of the functional groups can include those which form an amide bond, an ester bond, an ether bond, a carbonate bond, a carbamate bond, or a thioether bond, such functional groups can be, for example, amino groups; carboxyl groups; aldehyde groups; azide groups; alkyne and alkene groups; ketones; carbonates; carbonyl functionalities bonded to leaving groups such as cyano and succinimidyl and hydroxyl groups.

[0421] A linker can be connected to an antibody construct at a hinge cysteine. A linker can be connected to an antibody construct at a light chain constant domain lysine. A linker can be connected to an antibody construct at an engineered cysteine in the light chain. A linker can be connected to an antibody construct at an engineered light chain glutamine. A linker can be connected to an antibody construct at an unnatural amino acid engineered into the light chain. A linker can be connected to an antibody construct at a heavy chain constant domain lysine. A linker can be connected to an antibody construct at an engineered cysteine in the heavy chain. A linker can be connected to an antibody construct at an engineered heavy chain glutamine. A linker can be connected to an antibody construct an unnatural amino acid engineered into the heavy chain. Amino acids can be engineered into an amino acid sequence of an antibody construct as described herein, for example, and can be connected to a linker of a conjugate. Engineered amino acids can be added to a sequence of existing amino acids. Engineered amino acids can be substituted for one or more existing amino acids of a sequence of amino acids.

[0422] A linker can be conjugated to an antibody construct via a sulfhydryl group. A linker can be conjugated to an antibody construct via a primary amine. A linker can be a link created between an unnatural amino acid on an antibody construct reacting with an oxime bond that was formed by modifying a ketone group with an alkoxyamine on an immune-modulatory agent. In some embodiments, when a linker is connected to an antibody construct at the sites described herein, an Fc domain of the conjugate can bind to Fc receptors. In some embodiments, when a linker is connected to an antibody construct at the sites described herein, the antigen binding domain of the conjugate can bind its antigen. When a linker is connected to an antibody construct at the sites described herein, a binding domain of the conjugate can bind its antigen.

[0423] In a conjugate, the drug loading is represented by z, the number of immune-modulatory agent-linker molecules per antibody construct, or the number of immune-modulatory agents per antibody construct, depending on the particular conjugate. Depending on the context, z can represent the average number of immune-modulatory agent (-linker) molecules per antibody construct, also referred to the average drug loading. Z can range from 1 to 20, from 1 to 50 or from 1 to 100. In some conjugates, z is preferably from 1 to 8. In some preferred embodiments, when z represents the average drug loading, z ranges from about 2 to about 5. In some embodiments, z is about 2, about 3, about 4, or about 5. The average number of immune-modulatory agents per antibody construct in a preparation may be characterized by conventional means such as mass spectroscopy, HIC, ELISA assay, and HPLC.

### Pharmaceutical Formulations

[0424] The conjugates and methods described herein can be considered useful as pharmaceutical compositions for administration to a subject in need thereof. Pharmaceutical compositions can comprise at least the conjugates described herein and one or more pharmaceutically acceptable carriers, diluents, excipients, stabilizers, dispersing agents, suspending agents, and/or thickening agents. A pharmaceutical composition can comprise a conjugate comprising an antibody construct and an immune-modulatory agent, such as an agonist. A pharmaceutical composition can comprise a conjugate comprising an antibody construct having at least one antigen binding domain, an Fc domain, at least one immune-modulatory agent, such as an agonist and at least one linker. The pharmaceutical composition can comprise any conjugate described herein.

[0425] A pharmaceutical composition can further comprise buffers, antibiotics, steroids, carbohydrates, drugs (e.g., chemotherapy drugs), radiation, polypeptides, chelators, adjuvants and/or preservatives.

[0426] In a pharmaceutical composition, the conjugates can have an average drug loading. The drug loading, z, is the average number of immune-modulatory agent-linker molecules per antibody construct, or the number of immune-modulatory agents per antibody construct. Z can range from an average of 1 to 20, or 1-100. In some compositions, z is preferably from 1 to 8, from 2 to 5, from 3-5, about 2 or about 4. The average number of immune-modulatory agents per antibody construct in a preparation may be characterized by conventional means such as mass spectroscopy, HIC, ELISA assay, and HPLC.

[0427] Pharmaceutical compositions can be formulated using one or more physiologically-acceptable carriers comprising excipients and auxiliaries. Formulation can be modified depending upon the route of administration chosen. Pharmaceutical compositions comprising a conjugate as described herein can be manufactured, for example, by lyophilizing the conjugate, mixing, dissolving, emulsifying, encapsulating or entrapping the conjugate. Pharmaceutical compositions comprising a conjugate as described herein can be manufactured, for example, by lyophilizing the conjugate, mixing, dissolving, emulsifying, encapsulating or entrapping the conjugate. The pharmaceutical compositions can also include the conjugates described herein in a free-base form or pharmaceutically-acceptable salt form.

[0428] Methods for formulation of the pharmaceutical compositions can include formulating any of the conjugates described herein with one or more inert, pharmaceutically-acceptable excipients or carriers to form a solid, semi-solid, or liquid composition. Solid compositions can include, for example, powders, tablets, dispersible granules and capsules, and in some aspects, the solid compositions further contain nontoxic, auxiliary substances, for example wetting or emulsifying agents, pH buffering agents, and other pharmaceutically-acceptable additives. Alternatively, the compositions described herein can be lyophilized or in powder form for reconstitution with a suitable vehicle, e.g., sterile pyrogen-free water, before use

[0429] Pharmaceutical compositions of the conjugates described herein can comprise at least a conjugate as an active ingredient, respectively. The active ingredients can be entrapped in microcapsules prepared, for example, by coacervation techniques or by interfacial polymerization (e.g., hydroxymethylcellulose or gelatin microcapsules and poly-(methylmethacylate) microcapsules, respectively), in colloidal drug-delivery systems (e.g., liposomes, albumin microspheres, microemulsions, nano-particles and nanocapsules) or in macroemulsions.

[0430] Pharmaceutical compositions as described herein often further can comprise more than one active compound as necessary for the particular indication being treated. The active compounds can have complementary activities that do not adversely affect each other. For example, the pharmaceutical composition can also comprise a chemotherapeutic agent, cytotoxic agent, cytokine, growth-inhibitory agent, anti-hormonal agent, anti-angiogenic agent, and/or cardioprotectant. Such molecules can be present in combination in amounts that are effective for the purpose intended.

[0431] The pharmaceutical compositions and formulations can be sterilized. Sterilization can be accomplished by filtration through sterile filtration.

[0432] The pharmaceutical compositions described herein can be formulated for administration as an injection. Non-limiting examples of formulations for injection can include a sterile suspension, solution or emulsion in oily or aqueous vehicles. Suitable oily vehicles can include, but are not limited to, lipophilic solvents or vehicles such as fatty oils or synthetic fatty acid esters, or liposomes. Aqueous injection suspensions can contain substances which increase the viscosity of the suspension. The suspension can also contain suitable stabilizers. Injections can be formulated for bolus injection or continuous infusion. Alternatively, the pharmaceutical compositions described herein can be lyophilized or in powder form for reconstitution with a suitable vehicle, e.g., sterile pyrogen-free water, before use.

[0433] For parenteral administration, the conjugates can be formulated in a unit dosage injectable form (e.g., a solution, suspension, emulsion) in association with a pharmaceutically acceptable parenteral vehicle. Such vehicles can be inherently nontoxic, and non-therapeutic. A vehicle can be water, saline, Ringer's solution, dextrose solution, and 5% human serum albumin. Nonaqueous vehicles such as fixed oils and ethyl oleate can also be used. Liposomes can be used as carriers. The vehicle can contain minor amounts of additives such as substances that enhance isotonicity and chemical stability (e.g., buffers and preservatives).

[0434] Sustained-release preparations can also be prepared. Examples of sustained-release preparations can include semipermeable matrices of solid hydrophobic polymers that can contain the conjugate, and these matrices can be in the form of shaped articles (e.g., films or microcapsules). Examples of sustained-release matrices can include polyesters, hydrogels (e.g., poly(2-hydroxyethyl-methacrylate), or poly(vinylalcohol)), polylactides, copolymers of L-glutamic acid and y ethyl-L-glutamate, non-degradable ethylene-vinyl acetate, degradable lactic acid-glycolic acid copolymers such as the LUPRON DEPO™ (i.e., injectable microspheres composed of lactic acid-glycolic acid copolymer and leuprolide acetate), and poly-D-(−)-3-hydroxybutyric acid.

[0435] Pharmaceutical formulations of the compositions described herein can be prepared for storage by mixing a conjugate with a pharmaceutically acceptable carrier, excipient, and/or a stabilizer. This formulation can be a lyophilized formulation or an aqueous solution. Acceptable carriers, excipients, and/or stabilizers can be nontoxic to recipients at the dosages and concentrations used. Acceptable carriers, excipients, and/or stabilizers can include buffers such as phosphate, citrate, and other organic acids; antioxidants including ascorbic acid and methionine; preservatives, polypeptides; proteins, such as serum albumin or gelatin; hydrophilic polymers; amino acids; monosaccharides, disaccharides, and other carbohydrates including glucose, mannose, or dextrins; chelating agents such as EDTA; sugars such as sucrose, mannitol, trehalose or sorbitol; salt-forming counter-ions such as sodium; metal complexes; and/or non-ionic surfactants or polyethylene glycol.

### Therapeutic Applications

[0436] The conjugates, pharmaceutical compositions, and methods of the present disclosure can be useful for a plurality of different subjects including, but are not limited to, a mammal, human, non-human mammal, a domesticated animal (e.g., laboratory animals, household pets, or livestock), non-domesticated animal (e.g., wildlife), dog, cat, rodent, mouse, hamster, cow, bird, chicken, fish, pig, horse, goat, sheep, rabbit, and any combination thereof.

[0437] The conjugates, pharmaceutical compositions, and methods described herein can be useful as a therapeutic, for example a treatment that can be administered to a subject in need thereof. A therapeutic effect can be obtained in a subject by reduction, suppression, remission, or eradication of a disease state, including, but not limited to, a symptom thereof. A therapeutic effect in a subject having a disease or condition, or pre-disposed to have or is beginning to have the disease or condition, can be obtained by a reduction, a suppression, a prevention, a remission, or an eradication of the condition or disease, or pre-condition or pre-disease state.

[0438] In practicing the methods described herein, therapeutically-effective amounts of the conjugates or pharmaceutical compositions described herein can be administered to a subject in need thereof, often for treating and/or preventing a condition or progression thereof. A pharmaceutical composition can affect the physiology of the subject, such as the immune system, inflammatory response, or other physiologic affect. A therapeutically-effective amount can vary widely depending on the severity of the disease, the age and relative health of the subject, the potency of the compounds used, and other factors.

[0439] Treat and/or treating can refer to any indicia of success in the treatment or amelioration of the disease or condition. Treating can include, for example, reducing, delaying or alleviating the severity of one or more symptoms of the disease or condition, or it can include reducing the frequency with which symptoms of a disease, defect, disorder, or adverse condition, and the like, are experienced by a patient. Treat can be used herein to refer to a method that results in some level of treatment or amelioration of the disease or condition, and can contemplate a range of results directed to that end, including but not restricted to prevention of the condition entirely.

[0440] Prevent, preventing and the like can refer to the prevention of the disease or condition, e.g., tumor formation, in the patient. For example, if an individual at risk of developing a tumor or other form of cancer is treated with the methods of the present disclosure and does not later develop the tumor or other form of cancer, then the disease has been prevented, at least over a period of time, in that individual.

[0441] Prevent, preventing and the like also can refer to the prevention of relapse of the disease or condition, e.g., tumor formation, in the patient. For example, an individual at risk of relapse of a tumor or other form of cancer after treatment and obtaining a state of remission can be treated with the methods of the present disclosure to prevent relapse.

[0442] A therapeutically effective amount can be the amount of a conjugate or pharmaceutical compositions or an active component thereof sufficient to provide a beneficial effect or to otherwise reduce a detrimental non-beneficial event to the individual to whom the composition is administered. A therapeutically effective dose can be a dose that produces one or more desired or desirable (e.g., beneficial) effects for which it is administered, such administration occurring one or more times over a given period of time. An exact dose can depend on the purpose of the treatment, and can be ascertainable by one skilled in the art using known techniques.

[0443] The conjugates or pharmaceutical compositions described herein that can be used in therapy can be formulated and dosages established in a fashion consistent with good medical practice taking into account the disorder to be treated, the condition of the individual patient, the site of delivery of the conjugate or pharmaceutical composition, the method of administration and other factors known to practitioners. The conjugates or pharmaceutical compositions can be prepared according to the description of preparation described herein.

[0444] One of ordinary skill in the art would understand that the amount, duration and frequency of administration of a pharmaceutical composition or conjugate described herein to a subject in need thereof depends on several factors including, for example but not limited to, the health of the subject, the specific disease or condition of the patient, the grade or level of a specific disease or condition of the patient, the additional therapeutics the subject is being or has been administered, and the like.

[0445] The methods, conjugates and pharmaceutical compositions described herein can be for administration to a subject in need thereof. Often, administration of the conjugates or pharmaceutical compositions can include routes of administration, non-limiting examples of administration routes include intravenous, intraarterial, subcutaneous, subdural, intramuscular, intracranial, intrasternal, intratumoral, or intraperitoneally. Additionally, a pharmaceutical composition or conjugate can be administered to a subject by additional routes of administration, for example, by inhalation, oral, dermal, intranasal, or intrathecal administration.

[0446] Pharmaceutical compositions and conjugates of the present disclosure can be administered to a subject in need thereof in a first administration, and in one or more additional administrations. The one or more additional administrations can be administered to the subject in need thereof minutes, hours, days, weeks or months following the first administration. Any one of the additional administrations can be administered to the subject in need thereof less than 21 days, or less than 14 days, less than 10 days, less than 7 days, less than 4 days or less than 1 day after the first administration. The one or more administrations can occur more than once per day, more than once per week or more than once per month. The conjugates or pharmaceutical compositions can be administered to the subject in need thereof in cycles of 21 days, 14 days, 10 days, 7 days, 4 days or daily over a period of one to seven days.

### Diseases, Conditions and the Like

[0447] The conjugates and pharmaceutical compositions, and methods provided herein can be useful for the treatment of a plurality of diseases, conditions, preventing a disease or a condition in a subject or other therapeutic applications for subjects in need thereof. Often the conjugates, pharmaceutical compositions, and methods provided herein can be useful for treatment of hyperplastic conditions, including but not limited to, neoplasms, cancers, tumors and the like. A condition, such as a cancer, can be associated with expression of a molecule on the cancer cells. Often, the molecule expressed by the cancer cells can comprise an extracellular portion capable of recognition by the antibody portion of the antibody construct. A molecule expressed by the cancer cells can be a tumor antigen. An antibody construct of a conjugate or pharmaceutical composition thereof can recognize a tumor antigen. A tumor antigen can be, for example, GD2, GD3, GM2, Le^{y}, sLe, polysialic acid, fucosyl GM1, Tn, STn, BM3, or GloboH, or CD5, CD19, CD20, CD25, CD37, CD30, CD33, CD45, CAMPATH-1, BCMA, CS-1, PD-L1, B7-H3, B7-DC (PD-L2), HLA-DR, carcinoembryonic antigen (CEA), TAG-72, MUC1, MUC15, MUC16, folate-binding protein, A33, G250, prostate-specific membrane antigen (PSMA), CA-125, CA19-9, epidermal growth factor, HER2, IL-2 receptor, EGFRvIII (de2-7 EGFR), EGFR, fibroblast activation protein (FAP), tenascin, a metalloproteinase, endosialin, vascular endothelial growth factor, αvβ3, WT1, LMP2, HPV E6, HPV E7, p53 nonmutant, NY-ESO-1, GLP-3, MelanA/MART1, Ras mutant, gp100, p53 mutant, PR1, bcr-abl, tyrosinase, survivin, PSA, hTERT, STN1, TNC, a Sarcoma translocation breakpoint fusion protein, EphA2, PAP, ML-IAP, AFP, ERG, NA17, PAX3, ALK, androgen receptor, cyclin B1, MYCN, RhoC, TRP-2, mesothelin (MSLN), PSCA, MAGE A1, MAGE-A3, CYP1B1, PLAV1, BORIS, Tn, ETV6-AML, NY-BR-1, RGS5, SART3, Carbonic anhydrase IX, PAX5, OY-TES1, Sperm protein 17, LCK, MAGE C2, MAGE A4, GAGE, TRAIL1, HMWMAA, AKAP-4, SSX2, XAGE 1, B7H3, Legumain, Tie 3, PAGE4, VEGFR2, MAD-CT-1, PDGFR-B, MAD-CT-2, ROR2, CMET, HER3, EPCAM, CA6, NAPI2B, TROP2, Claudin-6 (CLDN6), Claudin-16 (CLDN16), CLDN18.2, RON, LY6E, FRA, DLL3, PTK7, Uroplakin-1B (UPK1B), LIV1, ROR1, STRA6, TMPRSS3, TMPRSS4, TMEM238, Clorf186, Fos-related antigen 1, VEGFR1, endoglin, VTCN1 (B7-H4), VISTA, or a fragment thereof.

[0448] In certain embodiments, a tumor antigen can be selected from CD5, CD25, CD37, CD33, CD45, BCMA, CS-1, PD-L1, B7-H3, B7-DC (PD-L2), HLD-DR, carcinoembryonic antigen (CEA), TAG-72, EpCAM, MUC1, folate-binding protein (FOLR1), A33, G250 (carbonic anhydrase IX), prostate-specific membrane antigen (PSMA), GD2, GD3, GM2, Ley, CA-125, CA19-9 (MUC1 sLe(a)), epidermal growth factor, HER2, IL-2 receptor, EGFRvIII (de2-7 EGFR), fibroblast activation protein (FAP), a tenascin, a metalloproteinase, endosialin, avB3, LMP2, EphA2, PAP, AFP, ALK, polysialic acid, TRP-2, fucosyl GM1, mesothelin (MSLN), PSCA, sLe(a), GM3, BORIS, Tn, TF, GloboH, STn, CSPG4, AKAP-4, SSX2, Legumain, Tie 2, Tim 3, VEGFR2, PDGFR-B, ROR2, TRAIL1, MUC16, EGFR, CMET, HER3, MUC1, MUC15, CA6, NAPI2B, TROP2, CLDN18.2, RON, LY6E, FRAlpha, DLL3, PTK7, LIV1, ROR1, CLDN6, GPC3, ADAM12, LRRC15, CDH6, TMEFF2, TMEM238, GPNMB, ALPPL2, UPK1B, UPK2, LAMP-1, LY6K, EphB2, STEAP, ENPP3, CDH3, Nectin4, LYPD3, EFNA4, GPA33, SLITRK6 or HAVCR1.

[0449] Additionally, such tumor antigens can be derived from the following specific conditions and/or families of conditions, including but not limited to, cancers such as brain cancers, skin cancers, lymphomas, sarcomas, lung cancer, liver cancer, leukemias, uterine cancer, breast cancer, ovarian cancer, cervical cancer, bladder cancer, kidney cancer, hemangiosarcomas, bone cancers, blood cancers, testicular cancer, prostate cancer, stomach cancer, intestinal cancers, pancreatic cancer, and other types of cancers as well as pre-cancerous conditions such as hyperplasia or the like.

[0450] Non-limiting examples of cancers can include Acute lymphoblastic leukemia (ALL); Acute myeloid leukemia; Adrenocortical carcinoma; Astrocytoma, childhood cerebellar or cerebral; Basal-cell carcinoma; Bladder cancer; Bone tumor, osteosarcoma/malignant fibrous histiocytoma; Brain cancer; Brain tumors, such as, cerebellar astrocytoma, malignant glioma, ependymoma, medulloblastoma, visual pathway and hypothalamic glioma; Brainstem glioma; Breast cancer; Bronchial adenomas/carcinoids; Burkitt's lymphoma; Cerebellar astrocytoma; Cervical cancer; Cholangiocarcinoma; Chondrosarcoma; Chronic lymphocytic leukemia; Chronic myelogenous leukemia; Chronic myeloproliferative disorders; Colon cancer; Cutaneous T-cell lymphoma; Endometrial cancer; Ependymoma; Esophageal cancer; Eye cancers, such as, intraocular melanoma and retinoblastoma; Gallbladder cancer; Glioma; Hairy cell leukemia; Head and neck cancer; Heart cancer; Hepatocellular (liver) cancer; Hodgkin lymphoma; Hypopharyngeal cancer; Islet cell carcinoma (endocrine pancreas); Kaposi sarcoma; Kidney cancer (renal cell cancer); Laryngeal cancer; Leukaemia, such as, acute lymphoblastic, acute myeloid, chronic lymphocytic, chronic myelogenous and, hairy cell; Lip and oral cavity cancer; Liposarcoma; Lung cancer, such as, non-small cell and small cell; Lymphoma, such as, AIDS-related, Burkitt; Lymphoma, cutaneous T-Cell, Hodgkin and Non-Hodgkin, Macroglobulinemia, Malignant fibrous histiocytoma of bone/osteosarcoma; Melanoma; Merkel cell cancer; Mesothelioma; Multiple myeloma/plasma cell neoplasm; Mycosis fungoides; Myelodysplastic syndromes; Myelodysplastic/myeloproliferative diseases; Myeloproliferative disorders, chronic; Nasal cavity and paranasal sinus cancer; Nasopharyngeal carcinoma; Neuroblastoma; Oligodendroglioma; Oropharyngeal cancer; Osteosarcoma/malignant fibrous histiocytoma of bone; Ovarian cancer; Pancreatic cancer; Parathyroid cancer; Pharyngeal cancer; Pheochromocytoma; Pituitary adenoma; Plasma cell neoplasia; Pleuropulmonary blastoma; Prostate cancer; Rectal cancer; Renal cell carcinoma (kidney cancer); Renal pelvis and ureter, transitional cell cancer; Rhabdomyosarcoma; Salivary gland cancer; Sarcoma, Ewing family of tumors; Sarcoma, Kaposi; Sarcoma, soft tissue; Sarcoma, uterine; Sézary syndrome; Skin cancer (non-melanoma); Skin carcinoma; Small intestine cancer; Soft tissue sarcoma; Squamous cell carcinoma; Squamous neck cancer with occult primary, metastatic; Stomach cancer; Testicular cancer; Throat cancer; Thymoma and thymic carcinoma; Thymoma; Thyroid cancer; Thyroid cancer, childhood; Uterine cancer; Vaginal cancer; Waldenström macroglobulinemia; Wilms tumor and any combination thereof.

[0451] An antibody construct of the conjugate or composition may recognize a fibrotic associated antigen, autoimmune associated antigen, or autoinflammatory associated antigen. For example, an antigen may be Cadherin 11, PDPN, Integrin α4β7, Integrin α2β1, MADCAM, Nephrin, Podocin, IFNAR1, BDCA2, CD30, c-KIT, FAP, CD73, CD38, PDGFRβ, Integrin αvβ1, Integrin αvβ3, Integrin αvβ8, GARP, Endosialin, CTGF, Integrin αvβ6, CD40, PD-1, TIM-3, TNFR2, DEC205, DCIR, CD86, CD45RB, CD45RO, MHC Class II, CD25, or any fragment thereof. An antigen may be Cadherin 11, LRRC15, PDPN, Integrin α4β7, Integrin α2β1, MADCAM, Nephrin, Podocin, IFNAR1, BDCA2, CD30, c-KIT, FAP, CD73, CD38, PDGFRβ, Integrin αvβ1, Integrin αvβ3, Integrin αvβ8, GARP, Endosialin, CTGF, Integrin αvβ6, CD40, PD-1, TIM-3, TNFR2, DEC205, DCIR, CD86, CD45RB, CD45RO, MHC Class II, CD25, or any fragment thereof. An antigen may be Cadherin 11, LRRC15, or FAP. An antigen may be Cadherin 11, TNFR2, or FAP. An antigen may be TNFR2.

[0452] As described herein, an antigen binding domain portion of the conjugate may be configured to recognize an antigen expressed by a disease cell, such as for example, a disease antigen. Often such antigens are known to those of ordinary skill in the art, or newly found to be associated with such a condition, to be commonly associated with, and/or specific to, such conditions. For example, a disease antigen is, but is not limited to, Cadherin 11, PDPN, Integrin α4β7, Integrin α2β1, MADCAM, Nephrin, Podocin, IFNAR1, BDCA2, CD30, c-KIT, FAP, CD73, CD38, PDGFRβ, Integrin αvβ1, Integrin αvβ3, Integrin αvβ8, GARP, Endosialin, CTGF, Integrin αvβ6, CD40, PD-1, TIM-3, TNFR2, DEC205, DCIR, CD86, CD45RB, CD45RO, MHC Class II, CD25, or any fragment thereof. A disease antigen may also be Cadherin 11, LRRC15, PDPN, Integrin α4β7, Integrin α2β1, MADCAM, Nephrin, Podocin, IFNAR1, BDCA2, CD30, c-KIT, FAP, CD73, CD38, PDGFRβ, Integrin αvβ1, Integrin αvβ3, Integrin αvβ8, GARP, Endosialin, CTGF, Integrin αvβ6, CD40, PD-1, TIM-3, TNFR2, DEC205, DCIR, CD86, CD45RB, CD45RO, MHC Class II, CD25, or any fragment thereof. A disease antigen also may be FAP, LRRC15, or Cadherin 11. A disease antigen may be Cadherin 11, TNFR2, or FAP. A disease antigen may be TNFR2.

[0453] Non-limiting examples of fibrosis or fibrotic diseases include adhesive capsulitis, arterial stiffness, arthrofibrosis, atrial fibrosis, cirrhosis, Crohn's disease, collagenous fibroma, cystic fibrosis, Desmoid-type fibromatosis, Dupuytren's contracture, elastofibroma, endomyocardial fibrosis, fibroma of tendon sheath, glial scar, idiopathic pulmonary fibrosis, keloid, mediastinal fibrosis, myelofibrosis, nuchal fibroma, nephrogenic systemic fibrosis, old myocardial infarction, Peyronie's disease, pulmonary fibrosis, progressive massive fibrosis, radiation-induced lung injury, retroperitoneal fibrosis, scar, and scleroderma/systemic sclerosis.

[0454] Non-limiting examples of diseases that can be treated using a method according to the disclosure include acute disseminated encephalomyelitis (ADEM), acute necrotizing hemorrhagic leukoencephalitis, Addison's disease, agammaglobulinemia, alopecia, amyloidosis, ankylosing spondylitis (AS), Anti-GBM/Anti-TBM nephritis, antiphospholipid syndrome (APS), arthritis, autoimmune angioedema, autoimmune aplastic anemia, autoimmune dysautonomia, autoimmune hemolytic anemia, autoimmune hepatitis, autoimmune hyperlipidemia, autoimmune immunodeficiency, autoimmune inner ear disease (AIED), autoimmune myocarditis, autoimmune oophoritis, autoimmune pancreatitis, autoimmune retinopathy, autoimmune thrombocytopenic purpura (ATP), autoimmune thyroid disease, autoimmune urticarial, avascular Necrosis (Osteonecrosis)\Back Pain, axonal and neuronal neuropathy (AMAN), Balo disease, Behçet's Disease, bursitis and other soft tissue diseases, Bullous pemphigoid, cardiomyopathy, carpal tunnel syndrome, Castleman disease (CD), celiac disease, Chagas disease, chronic fatigue syndrome, chronic inflammatory demyelinating polyneuropathy (CIDP), chronic recurrent multifocal osteomyelitis (CRMO), Churg-Strauss, Cicatricial pemphigoid/benign mucosal pemphigoid, Cogan's syndrome, cold agglutinin disease, congenital heart block, Coxsackie myocarditis, CREST syndrome, collagen vascular disease, CPDD (Calcium Pyrophosphate Dihydrate Crystal Deposition Disease), Crohn's Disease, demyelinating neuropathies, degenerative joint disease, dermatitis herpetiformis, dermatomyositis, Devic's disease (neuromyelitis optica), diabetes (Type I), discoid lupus, DISH (Diffuse Idiopathic Skeletal Hypertosis), Dressler's syndrome, endometriosis, eosinophilic esophagitis (EoE), eosinophilic fasciitis, erythema nodosum, essential mixed cryoglobulinemia, dupuytren, EDS (Ehlers-Danlos Syndrome), EMS (Eosinophilia-Myalgia Syndrome), Evans syndrome, experimental allergic encephalomyelitis, Felty's Syndrome, fibromyalgia, fibromyositis, fibrosing alveolitis, giant cell arteritis (temporal arteritis), giant cell myocarditis, glomerulonephritis, Goodpasture's syndrome, gout, granulomatosis with Polyangiitis, Graves' Disease, Guillain-Barr-syndrome, Hashimoto's thyroiditis, hemolytic anemia, Henoch-Schonlein purpura (HSP), herpes gestationis or pemphigoid gestationis (PG), hypogammalglobulinemia, idiopathic pulmonary fibrosis, idiopathic thrombocytopenic purpura, IgA Nephropathy, IgG4-related sclerosing disease, immunoregulatory lipoproteins, inclusion body myositis (IBM), infectious arthritis, inflammatory bowel disease, interstitial cystitis (IC), JH (Joint Hypermobility), joint inflammation, juvenile rheumatoid arthritis, juvenile arthritis—other types and related conditions, juvenile dermatomyositis, juvenile diabetes (Type 1 diabetes), juvenile idiopathic arthritis (JIA), juvenile myositis (JM), juvenile non-inflammatory disorders, juvenile psoriatic arthritis, juvenile scleroderma, juvenile spondyloarthropathy syndromes, juvenile systemic lupus erythematosis (SLE), juvenile vasculitis, Kawasaki disease, Ledderhose Disease (Dupuytren of the feet), Lambert-Eaton syndrome, leukocytoclastic vasculitis, lichen planus, lichen sclerosus, ligneous conjunctivitis, linear IgA disease (LAD), lupus, Discoid, lupus erythematosis, lyme Disease, Marfan Syndrome, MCTD (Mixed Connective Tissue Disease), Meniere's disease, microscopic polyangiitis (MPA), mixed connective tissue disease (MCTD), Mooren's ulcer, Mucha-Habermann disease, multiple sclerosis, myasthenia gravis, myocarditis, myofascial pain, narcolepsy, neuromyelitis optica, neutropenia, ocular cicatricial pemphigoid, optic neuritis, osteoarthritis, osteogenesis imperfecta, osteonecrosis (Avascular Necrosis), osteoporosis, Paget's Disease, palindromic rheumatism (PR), PANDAS (Pediatric Autoimmune Neuropsychiatric Disorders Associated with Streptococcus), paraneoplastic cerebellar degeneration (PCD), paroxysmal nocturnal hemoglobinuria (PNH), Parry Romberg syndrome, Parsonnage-Turner syndrome, pars planitis (peripheral uveitis), pemphigus, pemphigus/pemphigoid, peripheral neuropathy, perivenous encephalomyelitis, pernicious anemia, Peyronie's Disease, POEMS syndrome (polyneuropathy, organomegaly, endocrinopathy, monoclonal gammopathy, skin changes), PMR (polymyalgia rheumatica), polyarteritis nodossa, polyarthritis, polymyalgia rheumatic, polymyositis, postmyocardial infarction syndrome, postpericardiotomy syndrome, primary biliary cirrhosis, primary sclerosing cholangitis, progesterone dermatitis, pseudogout, Pseudoxanthoma Elasticum (PXE), psoriatic arthritis, psoriasis, pure red cell aplasia (PRCA), pyoderma gangrenosum, Raynaud's, reactive arthritis, Reiter's (Reactive Arthritis), relapsing polychondritis, retroperitoneal fibrosis, rheumatic fever, rheumatoid Arthritis, RLD (Restless Leg Syndrome), RSD (Reflex Sympathetic Dystrophy), Sarcoidosis, Schmidt syndrome, scleritis, Sjögren's Syndrome, soft tissue disease, sperm and testicular autoimmunity, spinal stenosis, stiff person syndrome (SPS), Still's Disease, subacute bacterial endocarditis (SBE), Susac's syndrome, sympathetic ophthalmia (SO), Takayasu's arteritis, temporal arteritis/Giant cell arteritis, thrombocytopenic purpura (TTP), Tolosa-Hunt syndrome (THS), transverse myelitis, temporal arteritis, TMJ (Tempero-Mandibular Joint) problems, thyroiditis, Type I, II, & III autoimmune polyglandular syndromes, ulcerative colitis, undifferentiated connective tissue disease (UCTD), undifferentiated spondylarthropathy, uveitis, Wegener's Granulomatosis, vasculitis, vesiculobullous dermatosis, and vitiligo.

### EXAMPLES

[0455] The following examples are included to further describe some embodiments of the present disclosure, and should not be used to limit the scope of the disclosure.

### Example 1

### Synthesis of Linkers with Immune-Modulatory Agents

[0456] A protease cleavable linker is attached with an immune-modulatory agent. A linker attached to an immune-modulatory agent is formed to make a linker-immune modulatory compound construct. Subsequently, the construct is conjugated to an antibody.

[0457] A linker is linked with an antibody or antibody construct, in which the linker includes a protease cleavage site. The linker can be a PEGylated linker or a non-PEGylated linker. Subsequently, an immune-modulatory agent is conjugated to the linker linked with the antibody or antibody construct.

### Example 2

### General Process for Identifying Tumor Antigen Antigens (TAAs) and Proteases for Selective Local Delivery

[0458] A biological state is identified which characterizes targetable disease populations. A gene signature or signatures is next identified which can be used to segregate the targetable population from irrelevant populations based on the above biological state. This can be accomplished via either:
[0459] a. Identification and utilization of existing signatures from the literature, or
[0460] b. Derivation of signatures de novo via differential transcriptomic expression analysis by comparing gene expression levels in disease tissue samples which exhibit the desired phenotype against those which do not.
   Genes which are statistically significantly differentially expressed, as determined for example via a Kruskal-Wallis test between the two sample sets, are then grouped into sets of signatures based on further analysis of the annotated pathways in which those genes are expressed.

[0461] Once a gene signature has been identified, a tumor-associated antigen (TAA) is identified by first performing hierarchical clustering on the expression of the genes in the signature to partition disease samples into those which have high expression of the gene signature and those which have reduced expression of the signature. This identifies both potential disease indications as well as target populations within diseases suitable for intervention. To identify specific TAA candidates, the expression levels of surface-localized proteins within the disease-signature-high samples are then evaluated against normal tissues using again, for example, a Kruskal-Wallis test to generate a list of statistically significant surface-localized proteins preferentially expressed on disease samples. This list then serves as potential tumor-associated antigen targets.

[0462] To identify proteases for linker cleavage, a similar process to that outlined above is followed. In this case proteases are identified that are expressed in general in the disease tissues of interest, or (a more restricted set) those that are significantly upregulated over normal in disease tissues of interest.

[0463] Once the candidate sets of tumor antigen antigens and proteases have been identified, expression data sets are then queried again, either using bulk tissue expression data (e.g., TCGA) or single-cell expression data to identify those pairs of TAA and protease genes which show either correlated expression overall, or at least high co-expression in the disease tissues of interest.

[0464] To identify cell lines which can be used as reagents for validation of the identified TAA and protease, available public cancer cell line transcriptomic data bases are queried to sort and stack rank those cell lines which show the highest co-expression of the TAA gene and the protease. If no cell lines are found co-expressing both genes to a satisfactory level, the option to engineer one starting from a cell line which either expresses high levels of the TAA or high levels of the protease is a possibility, in this case introducing the gene for the missing component.

### Example 3

### Immune-Modulatory Conjugates

[0465] LRRC15 was identified through bioinformatics experiments as a desirable targeting antigen for combination with a conjugate for inhibiting TGFβR2 signaling for immuno-oncology and fibrosis. LRRC15 was identified by the following properties: a) high expression in cancer associated fibroblasts (CAF), b) association w/a TGFβ activated pathway signature for metastatic cancers, c) association w/FAP and ADAM12 expression in these cancers, and d) elevated expression in cancers compared to most normal tissues including tissues such as heart/heart valve, bone and skin known to be associated with toxicities upon TGFβ pathway inhibition.correlated expression overall, or at least high co-expression in the disease tissues of interest.

[0466] LRRC15-TGFβR2 inhibitor conjugates are suitable for treatment of subsets of metastatic pancreatic adenocarcinoma, metastatic colorectal adenocarcinoma, breast invasive carcinoma, squamous cell lung cancer, metastatic head & neck squamous cell carcinoma. Such conjugates are also suitable for treatment of fibrotic diseases of the liver, kidney, lung, and systemic scleroderma. LRRC15, FAP and ADAM12 are also elevated on activated myofibroblasts that promote fibrotic disease through TGFβ signaling.

[0467] The protease cleavable linkers of the conjugates include protease cleavage sites recognized by FAP or ADAM12. The FAP protease cleavage site can be optimized for cleavage by FAP endopeptidase activity starting w/SPRY2 derived “consensus” hexapeptide of SSGPVA. The ADAM12 protease cleavage site can be optimized for cleavage by ADAM12 endopeptidase starting with the decapeptide substrate FFLAQA(homoF)RSK. The linker is conjugated to interchain disulfide residues or to lysine residues. The TGFβR2 inhibitors can include degradative inhibitors, such as PROTACs. The antibody construct has an Fcnun domain.

[0468] MUC16 was identified through bioinformatics experiments as a desirable targeting antigen for combination with a conjugate for inhibiting the beta catenin pathway by inhibiting TNKS1/2 for immuno-oncology. The antibody construct can be an anti-MUC16 antibody. The Fc domain is an FcγR null domain. The protease cleavable linker includes a TMPRSS4 endopeptidase cleavage site. The cleavage site can be optimized for cleavage by TMPRSS4 endopeptidase activity starting w/ “consensus” octapeptide of IQSRGLFG. The linker-TNKS1/2 inhibitor construct is conjugated to the antibody construct at lysine residues.

[0469] CEACAM5 was identified through bioinformatics experiments as a desirable targeting antigen for combination with a conjugate for inhibiting the beta catenin pathway by inhibiting TNIK for immuno-oncology. The conjugate can be used in treating metastatic colorectal adenocarcinoma. The antibody construct is an anti-CEACAM5 antibody, and the Fc domain is an FcγR null. The immune-modulatory agent is a TNIK inhibitor.

### Example 4

### Determination of K_{d} Values

[0470] K_{d} is measured by a radiolabeled antigen binding assay (RIA) performed with an antibody construct of conjugate comprising the antigen binding domain of interest, and its antigen as described by the following assay.

[0471] Solution binding affinity of Fabs, antibody constructs, or conjugates comprising the antigen binding domain for the antigen of interest is measured by equilibrating the Fab, antibody construct, or conjugate with a minimal concentration of (¹²⁵I)-labeled antigen in the presence of a titration series of unlabeled antigen, then capturing bound antigen with an anti-Fab, anti-antibody construct, or anti-conjugate antibody-coated plate (see, e.g., Chen et al., J. Mol. Biol. 293:865-881 (1999)). To establish conditions for the assay, multi-well plates are coated overnight with 5 μg/mL of a capturing anti-Fab, anti-antibody construct, or anti-conjugate antibody (Cappel Labs) in 50 mM sodium carbonate (pH 9.6), and subsequently blocked with 2% (w/v) bovine serum albumin in PBS for two to five hours at room temperature (approximately 23° C.). In a non-adsorbent plate (Nunc #269620), 100 pM or 26 pM [¹²⁵I]-antigen are mixed with serial dilutions of a Fab, antibody construct, or conjugate of interest (e.g., consistent with assessment of the anti-VEGF antibody, Fab-12, in Presta et al., Cancer Res. 57:4593-4599 (1997)). The Fab, antibody construct, or conjugate of interest is then incubated overnight; however, the incubation may continue for a longer period (e.g., about 65 hours) to ensure that equilibrium is reached. Thereafter, the mixtures are transferred to the capture plate for incubation at room temperature (e.g., for one hour). The solution is then removed and the plate washed eight times with 0.1% polysorbate 20 (TWEEN-20®) in PBS. When the plates have dried, 150 μl/well of scintillant is added, and the plates are counted on a TOPCOUNT™ gamma counter (Packard) for ten minutes. Concentrations of each Fab, antibody construct, or conjugate that give less than or equal to 20% of maximal binding are chosen for use in competitive binding assays.

### Example 5

### Determination of K_{d} Values

[0472] K_{d} is measured using surface plasmon resonance assays using a BIACORE®-2000 or a BIACORE®-3000 (BIAcore, Inc., Piscataway, N.J.) at 25° C. with immobilized antigen CMS chips at ^{˜}10 response units (RU). Briefly, carboxymethylated dextran biosensor chips (CMS, BIACORE, Inc.) are activated with N-ethyl-N′-(3-dimethylaminopropyl)-carbodiimide hydrochloride (EDC) and N-hydroxysuccinimide (NETS) according to the supplier's instructions. Antigen is diluted with 10 mM sodium acetate, pH 4.8, to 5 μg/mL C0.2 μM) before injection at a flow rate of 5 μL/minute to achieve approximately 10 response units (RU) of coupled protein. Following the injection of antigen, 1 M ethanolamine is injected to block unreacted groups. For kinetics measurements, two-fold serial dilutions of Fab, antibody construct, or conjugate (0.78 nM to 500 nM) are injected in PBS with 0.05% polysorbate 20 (TWEEN-20™) surfactant (PBST) at 25° C. at a flow rate of approximately 25 μL/min. Association rates (kₒₙ) and dissociation rates (k_{off}) are calculated using a simple one-to-one Langmuir binding model (BIACORE® Evaluation Software version 3.2) by simultaneously fitting the association and dissociation sensorgrams. The equilibrium dissociation constant (K_{d}) is calculated as the ratio k_{off}/kₒₙ. See, e.g., Chen et al., J. Mol. Biol. 293:865-881 (1999). If the on-rate exceeds 106 M−1 s−1 by the surface plasmon resonance assay above, then the on-rate can be determined by using a fluorescent quenching technique that measures the increase or decrease in fluorescence emission intensity (excitation=295 nm; emission=340 nm, 16 nm band-pass) at 25° C. of a 20 nM anti-antigen antibody (Fab form, antibody construct form, or conjugate form) in PBS, pH 7.2, in the presence of increasing concentrations of antigen as measured in a spectrometer, such as a stop-flow equipped spectrophometer (Aviv Instruments) or a 8000-series SLM-AMINCO™ spectrophotometer (ThermoSpectronic) with a stirred cuvette.

### Example 6

### Lysine-based Bioconjugation

[0473] The antibody is exchanged into an appropriate buffer, for example, phosphate, borate, PBS, histine, or Tris-Acetate at a concentration of about 2 mg/mL to about 10 mg/mL. An appropriate number of equivalents of the immune-modulatory agent-linker construct are added as a solution with stirring. Dependent on the physical properties of the immune-modulatory agent-linker construct, a co-solvent is introduced prior to the addition of the immune-modulatory agent-linker construct to facilitate solubility. The reaction is stirred at room temperature for 2 hours to about 12 hours depending on the observed reactivity. The progression of the reaction is monitored by LC-MS. Once the reaction is deemed complete, the remaining immune-modulatory agent-linker constructs are removed by applicable methods and the lysine-linked immune-modulatory conjugate is exchanged into the desired formulation buffer.

[0474] Lysine-linked immune-modulatory conjugates are synthesized starting with 10 mg of antibody (mAb) and 10 equivalents of linker-immune-modulatory agent (ATAC) using the conditions described in Scheme below (ADC=antibody immune-modulatory agent conjugate).

[chemical structure]

### Example 7

### Cysteine-Based Bioconjugation

[0475] The antibody is exchanged into an appropriate buffer, for example, phosphate, borate, PBS, histidine or Tris-Acetate at a concentration of about 2 mg/mL to about 10 mg/mL with an appropriate number of equivalents of a reducing agent, for example, dithiothreitol or tris(2-carboxyethyl)phosphine. The resultant solution is stirred for an appropriate amount of time and temperature to effect the desired reduction. The immune-modulatory agent-linker construct is added as a solution with stirring. Dependent on the physical properties of the immune-modulatory agent-linker construct, a co-solvent is introduced prior to the addition of the immune-modulatory agent-linker construct to facilitate solubility. The reaction is stirred at room temperature for about 1 hour to about 12 hours depending on the observed reactivity. The progression of the reaction is monitored by liquid chromatography-mass spectrometry (LC-MS). Once the reaction is deemed complete, the remaining free immune-modulatory agent-linker construct is removed by applicable methods and the conjugate is exchanged into the desired formulation buffer. Such cysteine-based conjugates are synthesized starting with 10 mg of antibody (mAb) and 7 equivalents of linker-immune-modulatory agent using the conditions described in Scheme below (ADC=antibody immune-modulatory agent conjugates). Monomer content and drug-antibody ratios can be determined by methods described in the EXAMPLES.

[chemical structure]

### Example 8

### Determination of Molar Ratio

[0476] This example illustrates one method by which the molar ratio is determined. One microgram of conjugate is injected into an LC/MS such as an Agilent 6550 iFunnel Q-TOF equipped with an Agilent Dual Jet Stream ESI source coupled with Agilent 1290 Infinity UHPLC system. Raw data is obtained and is deconvoluted with software such as Agilent MassHunter Qualitative Analysis Software with BioConfirm using the Maximum Entropy deconvolution algorithm. The average mass of intact conjugates is calculated by the software, which can use top peak height at 25% for the calculation. This data is then imported into another program to calculate the molar ratio of the immune-modulatory agent:conjugate, such as Agilent molar ratio calculator.

### Example 9

### Additional Method for Determination of Molar Ratio

[0477] Another method for determination of molar ratio is as follows. First, 10 μL of a 5 mg/mL solution of a conjugate is injected into an HPLC system set-up with a TOSOH TSKgel Butyl-NPR™ hydrophobic interaction chromatography (HIC) column (2.5 μM particle size, 4.6 mm×35 mm) attached. Then, over the course of 18 minutes, a method is run in which the mobile phase gradient is run from 100% mobile phase A to 100% mobile phase B over the course of 12 minutes, followed by a six minute re-equilibration at 100% mobile phase A. The flow rate is 0.8 mL/min and the detector is set at 280 nM. Mobile phase A is 1.5 M ammonium sulfate, 25 mM sodium phosphate (pH 7). Mobile phase B is 25% isopropanol in 25 mM sodium phosphate (pH 7). Post-run, the chromatogram is integrated and the molar ratio is determined by summing the weighted peak area.

### Example 10

### Generation of a Bispecific Antibody Construct

[0478] A single chain Fv (scFv) against a target antigen in the VH-VL orientation is linked to the C-terminus of an antibody heavy chain (VH-CH1-CH2-CH3) against a second antigen to generate the anti-antigen 2 VH-CH1-CH2-CH3-anti-antigen 1 scFv heavy chain. This heavy chain is co-expressed with the light chain of anti-antigen 2 (VL-Ck) in the transient CHO system in 180 mL of CHO media. The supernatant is harvested 7 days after the transfection and the bispecific antibody construct is purified over HiScreen Mab Select SuRe Protein A column on GE AKTA Pure machine. The bispecific antibody construct is recovered.

### Example 11

### General Assay for Detection of Protease Cleavage Activity of Immune-Modulatory Conjugates

[0479] This example describes a cell-based assay for testing the activity of immune-modulatory conjugates, and in particular proteolytic release of the immune-modulatory agent in the presence of cells expressing a target antigen and associated protease.

[0480] A target antigen and associated protease are identified as described in Example 3. A conjugate is prepared that includes an antibody construct or an antibody that specifically binds to the target antigen (TA). The antibody has an Fcγ null Fc region. A linker is prepared that contain a protease cleavage site for the identified protease. A cell line expressing the target antigen and the protease (TA+ Endopeptidase+) on the cell surface, or in the culture medium in the case of the protease, is co-cultured with a bystander cell line that does not express the target antigen or the protease. The bystander cell line can be, for example, a payload target pathway reporter cell line, such as a HEK293 SMAD Luciferase reporter cell line. The immune-modulatory conjugate is added to the cultured cells. Release of the immune-modulatory agent from the conjugate is detected as a signal from the reporter cell line. Unconjugated antibody to the target antigen, a conjugate that does not bind to the target antigen, and unconjugated immune-modulatory agent are used as controls.

### Example 12

### The Anti-Tumor Response is Enhanced by Bispecific Tumor Targeting Conjugates

[0481] This example shows the anti-tumor immune response is enhanced by tumor targeting conjugates.

[0482] A human immune cell mediated anti-tumor response in a tumor xenograft model using immunocompromised mice is enhanced by bispecific tumor targeting conjugates with a TGFbeta inhibitor or a TNIK inhibitor. In immunocompromised mice, 1×10⁷ cells/animal human tumor cells from lines expressing LRRC15, FAP or MUC16 are co-injected subcutaneously into the flanks of mice from strain NSG (NOD.Cg-Prkd^{scid}IL-2^{tm1Wj1}/SzJ) along with donor matched human T cells (1×10⁶/animal) and mDCs (5×10⁵/animal). The incorporation of human mDCs in this model allows for the assessment of in vivo immune-mediated activity of the conjugates with the TGFbeta inhibitor or the TNIK inhibitor. Tumor targeting conjugates with the TGFbeta inhibitor or the TNIK inhibitor bearing one of the following antigen specificities, LRRC15, FAP or MUC16, are injected intraperitoneally after tumor injection and formation. The conjugate cleavable linker with a protease-cleavage site, wherein the protease is over-expressed and found in the microenvironment of the tumors as they form.

[0483] As a control, conjugates with a TGFbeta inhibitor or a TNIK inhibitor in which the antigen binding domain is not directed to antigen on the injected tumor is injected intraperitoneally after tumor injection and formation. Tumor growth is measured using calipers twice per week, beginning seven days post tumor cell transfer and ending at study termination, approximately 3 weeks after tumor cell inoculation. As is shown by the results, tumor growth is reduced only when the injected tumor cells express the antigen specificity of the tumor targeting conjugates with a TGFbeta inhibitor or a TNIK inhibitor.

### Example 13

### Treatment of LRRC15 Expressing Cancer by Administering a Bispecific Tumor Targeting Conjugate

[0484] This example describes treatment of a LRRC15 expressing cancer with a tumor targeting conjugate. A human patient is diagnosed with a cancer that expresses the tumor-associated antigen LRRC15, such as metastatic pancreatic adenocarcinoma, metastatic colorectal adenocarcinoma, breast invasive carcinoma, squamous cell lung cancer, or metastatic head and neck squamous cell carcinoma. A LRRC15 tumor targeting conjugate a TGFbeta inhibitor, which specifically binds the tumor-associated antigen LRRC15, is administered to the patient. The conjugate comprises a protease cleavable linker having a protease cleavage site cleavable by ADAM12 or FAP. An anti-tumor response is induced against tumor cells expressing LRRC15, such as a T cell-mediated immune response and an innate immune response, leading to control and eradication of tumor cells.

### Example 14

### Stability of Bispecific Tumor Targeting Conjugate Containing an Immune-Modulatory Agent in IgG Depleted Human Serum

[0485] This example shows the stability of an immune-modulatory conjugate in IgG depleted human serum. Stability of the conjugate in human serum (IgG depleted) is measured over 96 hours at 37° C. using either a direct HIC-UV analysis approach (Method A) or an affinity capture approach (Method B). Conjugates are spiked in IgG-depleted human serum (BBI solutions #SF142-2) in sterile tubes (75% final serum concentration) and samples are split into 4 aliquots of equal size then transferred to a 37° C. incubator. One of the aliquots of each sample is taken from the incubator at each time-point (T=0h, 24h, 48h, 96h) and the stability of the conjugate, or the average immune-modulatory agent:antibody construct ratios (DAR), is recorded.

### Method A: Direct HIC-UV Analysis

[0486] At 0, 24, 48, and 96 hours after the beginning of incubation, immune-modulatory conjugate spiked in IgG depleted human serum is analyzed by analytical hydrophobic interaction chromatography (HIC) using a TOSOH TSKgel Butyl-NPR 4.6 mm×35 mm HIC column (TOSOH Bioscience, #14947) connected to a Dionex Ultimate 300016 HPLC system (ThermoFisher Scientific, Hemel Hemstead, UK). The stability of the conjugate is assessed and is found to remain stable at each time point. The average DAR is found to remain stable at each timepoint.

### Method B: Affinity Capture, De-Glycosylation and RP-ESI-MS Analysis

[0487] An immune-modulatory conjugate is immunocaptured from the IgG depleted human serum using an anti-Human IgG (Fc specific) biotin antibody immobilized on streptavidin beads at 0, 24, 48 and 96 hours after the beginning of incubation. After elution from the beads, the samples are de-glycosylated using agarose-immobilized EndoS (Genovis Inc, USA). The de-glycosylated immune-modulatory conjugate is analyzed by reverse phase chromatography hyphenated to electrospray ionization mass spectrometry (RP-ESI-MS) using an Acquity nano UPLC in line with a Xevo G2S Q-TOF (Waters, Elstree, UK). The separation is performed using an Acquity UPLC online coupled to an ESI-MS mass spectrometer. Mass spectrometric analysis is performed in positive ion mode, scanning from 1000 to 4000 m/z in high mass operating mode. The ion envelope produced by each sample is deconvoluted using the MaxEntl algorithm provided within the MassLynx software (Waters, Elstree, UK). The stability of the conjugate is assessed and is found to remain stable at each time point. The average DAR is found to remain stable at each timepoint.

### Example 15

### Activity of a TLR8 Agonist Conjugate on Monocytes and Macrophages is Mediated by FcγR Interaction

[0488] This example illustrates that the activity of a TLR8 benzazepine agonist on monocytes and macrophages is mediated by Fey receptor interactions.

[0489] Monocyte-Tumor Cell Co-Culture Assay. Human monocytes were isolated from fresh PBMCs by magnetic bead enrichment and plated in 96-well flat bottom microtiter plates (40,000/well). HER2-expressing tumor cells were then added (40,000/well) along with titrating concentrations of antibody conjugates with differing abilities to engage Fc receptors. After overnight culture, supernatants were harvested, and TNFα levels were determined by AlphaLISA.

[0490] Macrophage-Tumor Cell Co-Culture Assay. Human monocytes were isolated from fresh PBMCs by magnetic bead enrichment and differentiated into macrophages by culturing in the presence of M-CSF for 7 days. After differentiation, the macrophages were harvested and plated in 96-well flat bottom microtiter plates (40,000/well). HER2-expressing tumor cells were then added (40,000/well) along with titrating concentrations of antibody-drug conjugates with differing abilities to engage Fc receptors. After overnight culture, supernatants were harvested, and TNFα levels were determined by AlphaLISA.

[0491] Her2 FcγR null mutant antibody was prepared by making the following amino acid substitutions in a human IgG1 Fc domain: L234A, L235A, G237A, and K322A. Her2 FcRn null mutant antibody was prepared by making a H435A substitution in an IgG1 Fc domain. The double Her2 FcγR FcRn null mutant was prepared by making both set of amino acid substitutions in an IgG1 Fc domain of pertuzumab. Conjugates were prepared by conjugation of the monoclonal antibodies to a TLR8 benzazepine agonist (2-amino-N⁸-(5-((2-amino-3-phenylpropanamido)methyl)pyridin-3-yl)-N⁴,N⁴-dipropyl-3H-benzo[b]azepine-4, 8-dicarboxamide) and an mc-val-cit-PABC linker, as generally described in Example 7. The average drug loading was about 4.

[0492] Referring to FIG. 1A, stimulation of TNFα production by monocytes in response to a TLR8 benzazepine agonist was dependent on FcγR interaction with a functional antibody Fc domain. Her2 conjugate with a wildtype IgG1 Fc region stimulated TNFα production by monocytes. Mutant Her2 conjugate having an FcRn null mutation was also able to stimulate TNFα production, but to a lesser extent. In contrast, Her2 antibody conjugate having an FcγR null mutation stimulated minimal TNFα production.

[0493] Referring to FIG. 1B, similar results were obtained with macrophages. A functional FcγR-Fc binding domain interaction was needed to stimulate TNFα production by macrophages.

### Example 16

### Activity of a TLR8 Benzazepine Agonist Conjugate on Macrophaes can be Modulated by Modifying the Interaction of an Antibody Fc Fomain with Various Fcγ Receptors on Macrophages

[0494] This example illustrates that the activity of a TLR8 benzazepine agonist conjugate on macrophages is modulated by interaction with certain Fcγ receptors.

[0495] Macrophage-Tumor Cell Co-Culture Assay: Human monocytes were isolated from fresh PBMCs by magnetic bead enrichment and differentiated into macrophages by culturing in the presence of M-CSF for 7 days. After differentiation, macrophages were harvested and plated in 96-well flat bottom microtiter plates (40,000/well). HER2-expressing tumor cells were added (40,000/well) along with FcγR blocking Abs and incubated for 1 hr prior to adding titrating concentrations of Her2 antibody conjugate or an unconjugated control antibody. After overnight culture, supernatants were harvested, and TNFα levels were determined by AlphaLISA.

[0496] Her2x TLR8 conjugate was prepared by conjugation of a TLR8 benzazepine agonist to Her2 monoclonal antibody having a wildtype IgG1 Fc region, as described in Example 15.

[0497] Referring to FIG. 2, Her2 antibody conjugate was able to stimulate TNFα production in the presence of control antibody and in the presence of anti-CD16 antibody (FcγRIII). Blocking the interaction of the antibody Fc region minimally affected TNFα production. In contrast, addition of anti-CD64 (FcγR1) antibody (FcγR1) or anti-CD32 (FcγRII) antibody decreased TNFα production, with anti-CD32 antibody having the greater inhibition. Addition of all three anti-FcγR antibodies further diminished TNFα production.

[0498] These results indicate that the activity of a TLR8 benzazepine agonist conjugate on macrophages can be modulated by modifying the interaction of an antibody Fc domain with various Fcγ receptors on macrophages.

### Example 17

### Activation of Dendritic Cells by TLR8 Agonist Antibody Conjugate can be Modulated by Modifying the Interaction of an Antibody Fc Fomain with Various Fcγ Receptors

[0499] This example illustrates that the activity of a TLR8 benzazepine agonist on dendritic cells can be modulated by Fcγ receptor interaction.

[0500] mDC Fc Blocking Stimulation Method: PBMC were isolated from normal human leukapheresis product using Ficoll purification, and monocytes were enriched from PBMC using Stem Cell Technologies Human Monocyte without CD16 Depletion Negative Selection Kits according to the manufacturer's instructions. Monocytes were frozen and stored in liquid nitrogen. Seven days prior to assay, monocytes were thawed and differentiated into monocyte derived dendritic cells (mDC). For differentiation, monocytes were plated at a concentration of 1×10⁶ monocytes/mL in X-Vivo15 media supplemented with 10% fetal bovine serum (FBS), 100 ng/mL recombinant human GM-CSF and 10 ng/mL recombinant human IL-4 and incubated at 37° C. in 5% CO₂. On day 4 of differentiation, half of the media was removed and replaced with fresh X-Vivo15 media supplemented with 10% fetal bovine serum (FBS), 100 ng/mL recombinant human GM-CSF and 10 ng/mL recombinant human IL-4 and returned to 37° C. in 5% CO₂.

[0501] mDC were lifted and re-plated on day 7 of differentiation at 4×10⁴ cell/well with 4×10⁴ cell/well BT474 Her2 positive tumor cells in 96-well flat bottom plates in assay media (RPMI 1640 base media supplemented with 10% FBS, 50 μg/mL Penicillin, 50 U/mL Streptomycin, 1 mM HEPES, 1× non-essential amino acids, 0.1 mM sodium pyruvate). Mouse monoclonal blocking antibodies to human CD16, CD32, CD64 or mouse isotype control were added to co-cultures at 10 μg/mL and pre-incubated at 37° C. in 5% CO₂for 30 minutes. Antibody-drug conjugate was diluted in assay media and then added to co-cultures at final concentrations starting at 100 nM and diluted 4-fold to 0.024 nM in 100 μL/well total volume. Co-cultures were incubated for 24 hours at 37° C. in 5% CO₂ before cell culture supernatants were harvested. IL-12p40 production was assessed in culture supernatants using the Perkin Elmer Human IL-12/IL-23 p40 AlphaLISA Kit according to the manufacturer's instructions. Plates were read using a Perkin Elmer Envision plate reader.

[0502] Her2×TLR8 conjugate was prepared by conjugation of TLR8 benzazepine agonist and a linker to Her2 monoclonal antibody having a wildtype IgG1 Fc region, as generally described in Example 15.

[0503] Referring to FIG. 3, Her2 antibody conjugate was able to stimulate IL-12 production in the presence of control antibody and in the presence of anti-CD32 antibody (FcγRII) and anti-CD64 (FcγRI) antibody. Addition of anti-CD16 (FcγRIII) antibody or all three anti-FcγR antibodies reduced IL-12 production, but did not eliminate IL-12 production by DCs.

[0504] While aspects of the present disclosure have been shown and described herein, it will be apparent to those skilled in the art that such aspects are provided by way of example only. Numerous variations, changes, and substitutions will now occur to those skilled in the art without departing from the disclosure. It should be understood that various alternatives to the aspects of the disclosure described herein may be employed in practicing the disclosure. It is intended that the following claims define the scope of the disclosure and that methods and structures within the scope of these claims and their equivalents be covered thereby.

The application's sequence listing, which the Patent Office published only in electronic form, follows.

SEQUENCE LISTING (836 sequences)

SEQ ID NO: 1 - protein, 452 aa, Artificial Sequence
  source: /note="Description of Artificial Sequence: Synthetic polypeptide"
QVQLVQSGAEVKKPGASVKVSCKASGYTFTGYYMHWVRQAPGQGLEWMGWINPDSGGTNYAQKFQGRVTMTRDTSISTAYMELNRLRSDDTAVYYCARDQPLGYCTNGVCSYFDYWGQGTLVTVSSASTKGPSVFPLAPCSRSTSESTAALGCLVKDYFPEPVTVSWNSGALTSGVHTFPAVLQSSGLYSLSSVVTVPSSNFGTQTYTCNVDHKPSNTKVDKTVERKCCVECPPCPAPPVAGPSVFLFPPKPKDTLMISRTPEVTCVVVDVSHEDPEVQFNWYVDGVEVHNAKTKPREEQFNSTFRVVSVLTVVHQDWLNGKEYKCKVSNKGLPAPIEKTISKTKGQPREPQVYTLPPSREEMTKNQVSLTCLVKGFYPSDIAVEWESNGQPENNYKTTPPMLDSDGSFFLYSKLTVDKSRWQQGNVFSCSVMHEALHNHYTQKSLSLSPGK

SEQ ID NO: 2 - protein, 126 aa, Artificial Sequence
  source: /note="Description of Artificial Sequence: Synthetic polypeptide"
QVQLVQSGAEVKKPGASVKVSCKASGYTFTGYYMHWVRQAPGQGLEWMGWINPDSGGTNYAQKFQGRVTMTRDTSISTAYMELNRLRSDDTAVYYCARDQPLGYCTNGVCSYFDYWGQGTLVTVSS

SEQ ID NO: 3 - protein, 8 aa, Artificial Sequence
  source: /note="Description of Artificial Sequence: Synthetic peptide"
GYTFTGYY

SEQ ID NO: 4 - protein, 8 aa, Artificial Sequence
  source: /note="Description of Artificial Sequence: Synthetic peptide"
INPDSGGT

SEQ ID NO: 5 - protein, 19 aa, Artificial Sequence
  source: /note="Description of Artificial Sequence: Synthetic peptide"
ARDQPLGYCTNGVCSYFDY

SEQ ID NO: 6 - protein, 214 aa, Artificial Sequence
  source: /note="Description of Artificial Sequence: Synthetic polypeptide"
DIQMTQSPSSVSASVGDRVTITCRASQGIYSWLAWYQQKPGKAPNLLIYTASTLQSGVPSRFSGSGSGTDFTLTISSLQPEDFATYYCQQANIFPLTFGGGTKVEIKRTVAAPSVFIFPPSDEQLKSGTASVVCLLNNFYPREAKVQWKVDNALQSGNSQESVTEQDSKDSTYSLSSTLTLSKADYEKHKVYACEVTHQGLSSPVTKSFNRGEC

SEQ ID NO: 7 - protein, 107 aa, Artificial Sequence
  source: /note="Description of Artificial Sequence: Synthetic polypeptide"
DIQMTQSPSSVSASVGDRVTITCRASQGIYSWLAWYQQKPGKAPNLLIYTASTLQSGVPSRFSGSGSGTDFTLTISSLQPEDFATYYCQQANIFPLTFGGGTKVEIK

SEQ ID NO: 8 - protein, 6 aa, Artificial Sequence
  source: /note="Description of Artificial Sequence: Synthetic peptide"
QGIYSW

SEQ ID NO: 9 - protein, 3 aa, Artificial Sequence
  source: /note="Description of Artificial Sequence: Synthetic peptide"
TAS

SEQ ID NO: 10 - protein, 9 aa, Artificial Sequence
  source: /note="Description of Artificial Sequence: Synthetic peptide"
QQANIFPLT

SEQ ID NO: 11 - protein, 449 aa, Artificial Sequence
  source: /note="Description of Artificial Sequence: Synthetic polypeptide"
EVQLVESGGGLVQPGGSLRLSCAASGFTFTDYTMDWVRQAPGKGLEWVADVNPNSGGSIYNQRFKGRFTLSVDRSKNTLYLQMNSLRAEDTAVYYCARNLGPSFYFDYWGQGTLVTVSSASTKGPSVFPLAPSSKSTSGGTAALGCLVKDYFPEPVTVSWNSGALTSGVHTFPAVLQSSGLYSLSSVVTVPSSSLGTQTYICNVNHKPSNTKVDKKVEPKSCDKTHTCPPCPAPELLGGPSVFLFPPKPKDTLMISRTPEVTCVVVDVSHEDPEVKFNWYVDGVEVHNAKTKPREEQYNSTYRVVSVLTVLHQDWLNGKEYKCKVSNKALPAPIEKTISKAKGQPREPQVYTLPPSREEMTKNQVSLTCLVKGFYPSDIAVEWESNGQPENNYKTTPPVLDSDGSFFLYSKLTVDKSRWQQGNVFSCSVMHEALHNHYTQKSLSLSPGK

SEQ ID NO: 12 - protein, 119 aa, Artificial Sequence [sequence omitted]

SEQ ID NO: 13 - protein, 8 aa, Artificial Sequence
  source: /note="Description of Artificial Sequence: Synthetic peptide"
GFTFTDYT

SEQ ID NO: 14 - protein, 8 aa, Artificial Sequence
  source: /note="Description of Artificial Sequence: Synthetic peptide"
VNPNSGGS

SEQ ID NO: 15 - protein, 12 aa, Artificial Sequence
  source: /note="Description of Artificial Sequence: Synthetic peptide"
ARNLGPSFYFDY

SEQ ID NO: 16 - protein, 214 aa, Artificial Sequence
  source: /note="Description of Artificial Sequence: Synthetic polypeptide"
DIQMTQSPSSLSASVGDRVTITCKASQDVSIGVAWYQQKPGKAPKLLIYSASYRYTGVPSRFSGSGSGTDFTLTISSLQPEDFATYYCQQYYIYPYTFGQGTKVEIKRTVAAPSVFIFPPSDEQLKSGTASVVCLLNNFYPREAKVQWKVDNALQSGNSQESVTEQDSKDSTYSLSSTLTLSKADYEKHKVYACEVTHQGLSSPVTKSFNRGEC

SEQ ID NO: 17 - protein, 107 aa, Artificial Sequence [sequence omitted]

SEQ ID NO: 18 - protein, 6 aa, Artificial Sequence
  source: /note="Description of Artificial Sequence: Synthetic peptide"
QDVSIG

SEQ ID NO: 19 - protein, 3 aa, Artificial Sequence
  source: /note="Description of Artificial Sequence: Synthetic peptide"
SAS

SEQ ID NO: 20 - protein, 9 aa, Artificial Sequence
  source: /note="Description of Artificial Sequence: Synthetic peptide"
QQYYIYPYT

SEQ ID NO: 21 - protein, 449 aa, Artificial Sequence
  source: /note="Description of Artificial Sequence: Synthetic polypeptide"
QVQLKQSGPGLVQPSQSLSITCTVSGFSLTNYGVHWVRQSPGKGLEWLGVIWSGGNTDYNTPFTSRLSINKDNSKSQVFFKMNSLQSNDTAIYYCARALTYYDYEFAYWGQGTLVTVSAASTKGPSVFPLAPSSKSTSGGTAALGCLVKDYFPEPVTVSWNSGALTSGVHTFPAVLQSSGLYSLSSVVTVPSSSLGTQTYICNVNHKPSNTKVDKKVEPKSCDKTHTCPPCPAPELLGGPSVFLFPPKPKDTLMISRTPEVTCVVVDVSHEDPEVKFNWYVDGVEVHNAKTKPREEQYNSTYRVVSVLTVLHQDWLNGKEYKCKVSNKALPAPIEKTISKAKGQPREPQVYTLPPSRDELTKNQVSLTCLVKGFYPSDIAVEWESNGQPENNYKTTPPVLDSDGSFFLYSKLTVDKSRWQQGNVFSCSVMHEALHNHYTQKSLSLSPGK

SEQ ID NO: 22 - protein, 119 aa, Artificial Sequence
  source: /note="Description of Artificial Sequence: Synthetic polypeptide"
QVQLKQSGPGLVQPSQSLSITCTVSGFSLTNYGVHWVRQSPGKGLEWLGVIWSGGNTDYNTPFTSRLSINKDNSKSQVFFKMNSLQSNDTAIYYCARALTYYDYEFAYWGQGTLVTVSA

SEQ ID NO: 23 - protein, 8 aa, Artificial Sequence
  source: /note="Description of Artificial Sequence: Synthetic peptide"
GFSLTNYG

SEQ ID NO: 24 - protein, 7 aa, Artificial Sequence
  source: /note="Description of Artificial Sequence: Synthetic peptide"
IWSGGNT

SEQ ID NO: 25 - protein, 13 aa, Artificial Sequence
  source: /note="Description of Artificial Sequence: Synthetic peptide"
ARALTYYDYEFAY

SEQ ID NO: 26 - protein, 214 aa, Artificial Sequence
  source: /note="Description of Artificial Sequence: Synthetic polypeptide"
DILLTQSPVILSVSPGERVSFSCRASQSIGTNIHWYQQRTNGSPRLLIKYASESISGIPSRFSGSGSGTDFTLSINSVESEDIADYYCQQNNNWPTTFGAGTKLELKRTVAAPSVFIFPPSDEQLKSGTASVVCLLNNFYPREAKVQWKVDNALQSGNSQESVTEQDSKDSTYSLSSTLTLSKADYEKHKVYACEVTHQGLSSPVTKSFNRGEC

SEQ ID NO: 27 - protein, 107 aa, Artificial Sequence
  source: /note="Description of Artificial Sequence: Synthetic polypeptide"
DILLTQSPVILSVSPGERVSFSCRASQSIGTNIHWYQQRTNGSPRLLIKYASESISGIPSRFSGSGSGTDFTLSINSVESEDIADYYCQQNNNWPTTFGAGTKLELK

SEQ ID NO: 28 - protein, 6 aa, Artificial Sequence
  source: /note="Description of Artificial Sequence: Synthetic peptide"
QSIGTN

SEQ ID NO: 29 - protein, 3 aa, Artificial Sequence
  source: /note="Description of Artificial Sequence: Synthetic peptide"
YAS

SEQ ID NO: 30 - protein, 9 aa, Artificial Sequence
  source: /note="Description of Artificial Sequence: Synthetic peptide"
QQNNNWPTT

SEQ ID NO: 31 - protein, 445 aa, Artificial Sequence
  source: /note="Description of Artificial Sequence: Synthetic polypeptide"
QVQLQESGPGLVKPSETLSLTCTVSGGSVSSGDYYWTWIRQSPGKGLEWIGHIYYSGNTNYNPSLKSRLTISIDTSKTQFSLKLSSVTAADTAIYYCVRDRVTGAFDIWGQGTMVTVSSASTKGPSVFPLAPCSRSTSESTAALGCLVKDYFPEPVTVSWNSGALTSGVHTFPAVLQSSGLYSLSSVVTVPSSNFGTQTYTCNVDHKPSNTKVDKTVERKCCVECPPCPAPPVAGPSVFLFPPKPKDTLMISRTPEVTCVVVDVSHEDPEVQFNWYVDGVEVHNAKTKPREEQFNSTFRVVSVLTVVHQDWLNGKEYKCKVSNKGLPAPIEKTISKTKGQPREPQVYTLPPSREEMTKNQVSLTCLVKGFYPSDIAVEWESNGQPENNYKTTPPMLDSDGSFFLYSKLTVDKSRWQQGNVFSCSVMHEALHNHYTQKSLSLSPGK

SEQ ID NO: 32 - protein, 119 aa, Artificial Sequence [sequence omitted]

SEQ ID NO: 33 - protein, 10 aa, Artificial Sequence
  source: /note="Description of Artificial Sequence: Synthetic peptide"
GGSVSSGDYY

SEQ ID NO: 34 - protein, 7 aa, Artificial Sequence
  source: /note="Description of Artificial Sequence: Synthetic peptide"
IYYSGNT

SEQ ID NO: 35 - protein, 11 aa, Artificial Sequence
  source: /note="Description of Artificial Sequence: Synthetic peptide"
VRDRVTGAFDI

SEQ ID NO: 36 - protein, 214 aa, Artificial Sequence
  source: /note="Description of Artificial Sequence: Synthetic polypeptide"
DIQMTQSPSSLSASVGDRVTITCQASQDISNYLNWYQQKPGKAPKLLIYDASNLETGVPSRFSGSGSGTDFTFTISSLQPEDIATYFCQHFDHLPLAFGGGTKVEIKRTVAAPSVFIFPPSDEQLKSGTASVVCLLNNFYPREAKVQWKVDNALQSGNSQESVTEQDSKDSTYSLSSTLTLSKADYEKHKVYACEVTHQGLSSPVTKSFNRGEC

SEQ ID NO: 37 - protein, 107 aa, Artificial Sequence [sequence omitted]

SEQ ID NO: 38 - protein, 6 aa, Artificial Sequence
  source: /note="Description of Artificial Sequence: Synthetic peptide"
QDISNY

SEQ ID NO: 39 - protein, 3 aa, Artificial Sequence
  source: /note="Description of Artificial Sequence: Synthetic peptide"
DAS

SEQ ID NO: 40 - protein, 9 aa, Artificial Sequence
  source: /note="Description of Artificial Sequence: Synthetic peptide"
QHFDHLPLA

SEQ ID NO: 41 - protein, 453 aa, Artificial Sequence
  source: /note="Description of Artificial Sequence: Synthetic polypeptide"
QVQLQQSGAEVKKPGSSVKVSCKASGYTFTNYYIYWVRQAPGQGLEWIGGINPTSGGSNFNEKFKTRVTITVDESTNTAYMELSSLRSEDTAFYFCARQGLWFDSDGRGFDFWGQGSTVTVSSASTKGPSVFPLAPSSKSTSGGTAALGCLVKDYFPEPVTVSWNSGALTSGVHTFPAVLQSSGLYSLSSVVTVPSSSLGTQTYICNVNHKPSNTKVDKKVEPKSCDKTHTCPPCPAPELLGGPSVFLFPPKPKDTLMISRTPEVTCVVVDVSHEDPEVKFNWYVDGVEVHNAKTKPREEQYNSTYRVVSVLTVLHQDWLNGKEYKCKVSNKALPAPIEKTISKAKGQPREPQVYTLPPSREEMTKNQVSLTCLVKGFYPSDIAVEWESNGQPENNYKTTPPVLDSDGSFFLYSKLTVDKSRWQQGNVFSCSVMHEALHNHYTQKSLSLSPGK

SEQ ID NO: 42 - protein, 123 aa, Artificial Sequence
  source: /note="Description of Artificial Sequence: Synthetic polypeptide"
QVQLQQSGAEVKKPGSSVKVSCKASGYTFTNYYIYWVRQAPGQGLEWIGGINPTSGGSNFNEKFKTRVTITVDESTNTAYMELSSLRSEDTAFYFCARQGLWFDSDGRGFDFWGQGSTVTVSS

SEQ ID NO: 43 - protein, 8 aa, Artificial Sequence
  source: /note="Description of Artificial Sequence: Synthetic peptide"
GYTFTNYY

SEQ ID NO: 44 - protein, 8 aa, Artificial Sequence
  source: /note="Description of Artificial Sequence: Synthetic peptide"
INPTSGGS

SEQ ID NO: 45 - protein, 16 aa, Artificial Sequence
  source: /note="Description of Artificial Sequence: Synthetic peptide"
ARQGLWFDSDGRGFDF

SEQ ID NO: 46 - protein, 219 aa, Artificial Sequence
  source: /note="Description of Artificial Sequence: Synthetic polypeptide"
DIQMTQSPSSLSASVGDRVTITCRSSQNIVHSNGNTYLDWYQQTPGKAPKLLIYKVSNRFSGVPSRFSGSGSGTDFTFTISSLQPEDIATYYCFQYSHVPWTFGQGTKLEIKRTVAAPSVFIFPPSDEQLKSGTASVVCLLNNFYPREAKVQWKVDNALQSGNSQESVTEQDSKDSTYSLSSTLTLSKADYEKHKVYACEVTHQGLSSPVTKSFNRGEC

SEQ ID NO: 47 - protein, 112 aa, Artificial Sequence
  source: /note="Description of Artificial Sequence: Synthetic polypeptide"
DIQMTQSPSSLSASVGDRVTITCRSSQNIVHSNGNTYLDWYQQTPGKAPKLLIYKVSNRFSGVPSRFSGSGSGTDFTFTISSLQPEDIATYYCFQYSHVPWTFGQGTKLEIK

SEQ ID NO: 48 - protein, 11 aa, Artificial Sequence
  source: /note="Description of Artificial Sequence: Synthetic peptide"
QNIVHSNGNTY

SEQ ID NO: 49 - protein, 3 aa, Artificial Sequence
  source: /note="Description of Artificial Sequence: Synthetic peptide"
KVS

SEQ ID NO: 50 - protein, 9 aa, Artificial Sequence
  source: /note="Description of Artificial Sequence: Synthetic peptide"
FQYSHVPWT

SEQ ID NO: 51 - protein, 455 aa, Artificial Sequence
  source: /note="Description of Artificial Sequence: Synthetic polypeptide"
QVQLVESGGGVVQPGRSLRLSCAASGFTFSTYGMHWVRQAPGKGLEWVAVIWDDGSYKYYGDSVKGRFTISRDNSKNTLYLQMNSLRAEDTAVYYCARDGITMVRGVMKDYFDYWGQGTLVTVSSASTKGPSVFPLAPSSKSTSGGTAALGCLVKDYFPEPVTVSWNSGALTSGVHTFPAVLQSSGLYSLSSVVTVPSSSLGTQTYICNVNHKPSNTKVDKKVEPKSCDKTHTCPPCPAPELLGGPSVFLFPPKPKDTLMISRTPEVTCVVVDVSHEDPEVKFNWYVDGVEVHNAKTKPREEQYNSTYRVVSVLTVLHQDWLNGKEYKCKVSNKALPAPIEKTISKAKGQPREPQVYTLPPSREEMTKNQVSLTCLVKGFYPSDIAVEWESNGQPENNYKTTPPVLDSDGSFFLYSKLTVDKSRWQQGNVFSCSVMHEALHNHYTQKSLSLSPGK

SEQ ID NO: 52 - protein, 125 aa, Artificial Sequence [sequence omitted]

SEQ ID NO: 53 - protein, 8 aa, Artificial Sequence
  source: /note="Description of Artificial Sequence: Synthetic peptide"
GFTFSTYG

SEQ ID NO: 54 - protein, 8 aa, Artificial Sequence
  source: /note="Description of Artificial Sequence: Synthetic peptide"
IWDDGSYK

SEQ ID NO: 55 - protein, 18 aa, Artificial Sequence
  source: /note="Description of Artificial Sequence: Synthetic peptide"
ARDGITMVRGVMKDYFDY

SEQ ID NO: 56 - protein, 214 aa, Artificial Sequence
  source: /note="Description of Artificial Sequence: Synthetic polypeptide"
AIQLTQSPSSLSASVGDRVTITCRASQDISSALVWYQQKPGKAPKLLIYDASSLESGVPSRFSGSESGTDFTLTISSLQPEDFATYYCQQFNSYPLTFGGGTKVEIKRTVAAPSVFIFPPSDEQLKSGTASVVCLLNNFYPREAKVQWKVDNALQSGNSQESVTEQDSKDSTYSLSSTLTLSKADYEKHKVYACEVTHQGLSSPVTKSFNRGEC

SEQ ID NO: 57 - protein, 107 aa, Artificial Sequence [sequence omitted]

SEQ ID NO: 58 - protein, 6 aa, Artificial Sequence
  source: /note="Description of Artificial Sequence: Synthetic peptide"
QDISSA

SEQ ID NO: 59 - protein, 3 aa, Artificial Sequence
  source: /note="Description of Artificial Sequence: Synthetic peptide"
DAS

SEQ ID NO: 60 - protein, 9 aa, Artificial Sequence
  source: /note="Description of Artificial Sequence: Synthetic peptide"
QQFNSYPLT

SEQ ID NO: 61 - protein, 449 aa, Artificial Sequence
  source: /note="Description of Artificial Sequence: Synthetic polypeptide"
EVQLVESGGGLVQPGGSLRLSCAASGYTFTSYWLHWVRQAPGKGLEWVGMIDPSNSDTRFNPNFKDRFTISADTSKNTAYLQMNSLRAEDTAVYYCATYRSYVTPLDYWGQGTLVTVSSASTKGPSVFPLAPSSKSTSGGTAALGCLVKDYFPEPVTVSWNSGALTSGVHTFPAVLQSSGLYSLSSVVTVPSSSLGTQTYICNVNHKPSNTKVDKKVEPKSCDKTHTCPPCPAPELLGGPSVFLFPPKPKDTLMISRTPEVTCVVVDVSHEDPEVKFNWYVDGVEVHNAKTKPREEQYNSTYRVVSVLTVLHQDWLNGKEYKCKVSNKALPAPIEKTISKAKGQPREPQVYTLPPSREEMTKNQVSLTCLVKGFYPSDIAVEWESNGQPENNYKTTPPVLDSDGSFFLYSKLTVDKSRWQQGNVFSCSVMHEALHNHYTQKSLSLSPGK

SEQ ID NO: 62 - protein, 119 aa, Artificial Sequence [sequence omitted]

SEQ ID NO: 63 - protein, 8 aa, Artificial Sequence
  source: /note="Description of Artificial Sequence: Synthetic peptide"
GYTFTSYW

SEQ ID NO: 64 - protein, 8 aa, Artificial Sequence
  source: /note="Description of Artificial Sequence: Synthetic peptide"
IDPSNSDT

SEQ ID NO: 65 - protein, 12 aa, Artificial Sequence
  source: /note="Description of Artificial Sequence: Synthetic peptide"
ATYRSYVTPLDY

SEQ ID NO: 66 - protein, 220 aa, Artificial Sequence
  source: /note="Description of Artificial Sequence: Synthetic polypeptide"
DIQMTQSPSSLSASVGDRVTITCKSSQSLLYTSSQKNYLAWYQQKPGKAPKLLIYWASTRESGVPSRFSGSGSGTDFTLTISSLQPEDFATYYCQQYYAYPWTFGQGTKVEIKRTVAAPSVFIFPPSDEQLKSGTASVVCLLNNFYPREAKVQWKVDNALQSGNSQESVTEQDSKDSTYSLSSTLTLSKADYEKHKVYACEVTHQGLSSPVTKSFNRGEC

SEQ ID NO: 67 - protein, 113 aa, Artificial Sequence [sequence omitted]

SEQ ID NO: 68 - protein, 12 aa, Artificial Sequence
  source: /note="Description of Artificial Sequence: Synthetic peptide"
QSLLYTSSQKNY

SEQ ID NO: 69 - protein, 3 aa, Artificial Sequence
  source: /note="Description of Artificial Sequence: Synthetic peptide"
WAS

SEQ ID NO: 70 - protein, 9 aa, Artificial Sequence
  source: /note="Description of Artificial Sequence: Synthetic peptide"
QQYYAYPWT

SEQ ID NO: 71 - protein, 447 aa, Artificial Sequence
  source: /note="Description of Artificial Sequence: Synthetic polypeptide"
QVQLQQWGAGLLKPSETLSLTCAVYGGSFSGYYWSWIRQPPGKGLEWIGEINHSGSTNYNPSLKSRVTISVETSKNQFSLKLSSVTAADTAVYYCARDKWTWYFDLWGRGTLVTVSSASTKGPSVFPLAPSSKSTSGGTAALGCLVKDYFPEPVTVSWNSGALTSGVHTFPAVLQSSGLYSLSSVVTVPSSSLGTQTYICNVNHKPSNTKVDKKVEPKSCDKTHTCPPCPAPELLGGPSVFLFPPKPKDTLMISRTPEVTCVVVDVSHEDPEVKFNWYVDGVEVHNAKTKPREEQYNSTYRVVSVLTVLHQDWLNGKEYKCKVSNKALPAPIEKTISKAKGQPREPQVYTLPPSREEMTKNQVSLTCLVKGFYPSDIAVEWESNGQPENNYKTTPPVLDSDGSFFLYSKLTVDKSRWQQGNVFSCSVMHEALHNHYTQKSLSLSPGK

SEQ ID NO: 72 - protein, 117 aa, Artificial Sequence [sequence omitted]

SEQ ID NO: 73 - protein, 8 aa, Artificial Sequence
  source: /note="Description of Artificial Sequence: Synthetic peptide"
GGSFSGYY

SEQ ID NO: 74 - protein, 7 aa, Artificial Sequence
  source: /note="Description of Artificial Sequence: Synthetic peptide"
INHSGST

SEQ ID NO: 75 - protein, 11 aa, Artificial Sequence
  source: /note="Description of Artificial Sequence: Synthetic peptide"
ARDKWTWYFDL

SEQ ID NO: 76 - protein, 220 aa, Artificial Sequence
  source: /note="Description of Artificial Sequence: Synthetic polypeptide"
DIEMTQSPDSLAVSLGERATINCRSSQSVLYSSSNRNYLAWYQQNPGQPPKLLIYWASTRESGVPDRFSGSGSGTDFTLTISSLQAEDVAVYYCQQYYSTPRTFGQGTKVEIKRTVAAPSVFIFPPSDEQLKSGTASVVCLLNNFYPREAKVQWKVDNALQSGNSQESVTEQDSKDSTYSLSSTLTLSKADYEKHKVYACEVTHQGLSSPVTKSFNRGEC

SEQ ID NO: 77 - protein, 113 aa, Artificial Sequence [sequence omitted]

SEQ ID NO: 78 - protein, 12 aa, Artificial Sequence
  source: /note="Description of Artificial Sequence: Synthetic peptide"
QSVLYSSSNRNY

SEQ ID NO: 79 - protein, 3 aa, Artificial Sequence
  source: /note="Description of Artificial Sequence: Synthetic peptide"
WAS

SEQ ID NO: 80 - protein, 9 aa, Artificial Sequence
  source: /note="Description of Artificial Sequence: Synthetic peptide"
QQYYSTPRT

SEQ ID NO: 81 - protein, 449 aa, Artificial Sequence
  source: /note="Description of Artificial Sequence: Synthetic polypeptide"
QVQLQQSGAEVKKPGASVKVSCEASGYTFPSYVLHWVKQAPGQGLEWIGYINPYNDGTQYNEKFKGKATLTRDTSINTAYMELSRLRSDDTAVYYCARGFGGSYGFAYWGQGTLVTVSSASTKGPSVFPLAPSSKSTSGGTAALGCLVKDYFPEPVTVSWNSGALTSGVHTFPAVLQSSGLYSLSSVVTVPSSSLGTQTYICNVNHKPSNTKVDKKVEPKSCDKTHTCPPCPAPELLGGPSVFLFPPKPKDTLMISRTPEVTCVVVDVSHEDPEVKFNWYVDGVEVHNAKTKPREEQYNSTYRVVSVLTVLHQDWLNGKEYKCKVSNKALPAPIEKTISKAKGQPREPQVYTLPPSREEMTKNQVSLTCLVKGFYPSDIAVEWESNGQPENNYKTTPPVLDSDGSFFLYSKLTVDKSRWQQGNVFSCSVMHEALHNHYTQKSLSLSPGK

SEQ ID NO: 82 - protein, 119 aa, Artificial Sequence
  source: /note="Description of Artificial Sequence: Synthetic polypeptide"
QVQLQQSGAEVKKFGASVKVSCEASGYTFPSYVLHWVKQAPGQGLEWIGYINPYNDGTQTNKKFKGKATLTRDTSINTAYMELSRLRSDDTAVYYCARGFGGSYGFAYNGQGTLVTVSS

SEQ ID NO: 83 - protein, 8 aa, Artificial Sequence
  source: /note="Description of Artificial Sequence: Synthetic peptide"
GYTFPSYV

SEQ ID NO: 84 - protein, 8 aa, Artificial Sequence
  source: /note="Description of Artificial Sequence: Synthetic peptide"
INPYNDGT

SEQ ID NO: 85 - protein, 12 aa, Artificial Sequence
  source: /note="Description of Artificial Sequence: Synthetic peptide"
ARGFGGSYGFAY

SEQ ID NO: 86 - protein, 215 aa, Artificial Sequence
  source: /note="Description of Artificial Sequence: Synthetic polypeptide"
DIQLTQSPSSLSASVGDRVTMTCSASSSVSSSYLYWYQQKPGKAPKLWIYSTSNLASGVPARFSGSGSGTDFTLTISSLQPEDSASYFCHQWNRYPYTFGGGTRLEIKRTVAAPSVFIFPPSDEQLKSGTASVVCLLNNFYPREAKVQWKVDNALQSGNSQESVTEQDSKDSTYSLSSTLTLSKADYEKHKVYACEVTHQGLSSPVTKSFNRGEC

SEQ ID NO: 87 - protein, 108 aa, Artificial Sequence
  source: /note="Description of Artificial Sequence: Synthetic polypeptide"
DIQLTQSPSSLSASVGDRVTMTCSASSSVSSSYLYWYQQKPGKAPKLWIYSTSNLASGVPARFSGSGSGTDFTLTISSLQPEDSASYFCHQWNRYPYTFGGGTRLEIK

SEQ ID NO: 88 - protein, 7 aa, Artificial Sequence
  source: /note="Description of Artificial Sequence: Synthetic peptide"
SSVSSSY

SEQ ID NO: 89 - protein, 3 aa, Artificial Sequence
  source: /note="Description of Artificial Sequence: Synthetic peptide"
STS

SEQ ID NO: 90 - protein, 9 aa, Artificial Sequence
  source: /note="Description of Artificial Sequence: Synthetic peptide"
HQWNRYPYT

SEQ ID NO: 91 - protein, 446 aa, Artificial Sequence
  source: /note="Description of Artificial Sequence: Synthetic polypeptide"
EVQLVESGGGLVQPGGSLRLSCAASGYSITNDYAWNWVRQAPGKGLEWVGYISYSGYTTYNPSLKSRFTISRDTSKNTLYLQMNSLRAEDTAVYYCARWTSGLDYWGQGTLVTVSSASTKGPSVFPLAPSSKSTSGGTAALGCLVKDYFPEPVTVSWNSGALTSGVHTFPAVLQSSGLYSLSSVVTVPSSSLGTQTYICNVNHKPSNTKVDKKVEPKSCDKTHTCPPCPAPELLGGPSVFLFPPKPKDTLMISRTPEVTCVVVDVSHEDPEVKFNWYVDGVEVHNAKTKPREEQYNSTYRVVSVLTVLHQDWLNGKEYKCKVSNKALPAPIEKTISKAKGQPREPQVYTLPPSREEMTKNQVSLTCLVKGFYPSDIAVEWESNGQPENNYKTTPPVLDSDGSFFLYSKLTVDKSRWQQGNVFSCSVMHEALHNHYTQKSLSLSPGK

SEQ ID NO: 92 - protein, 116 aa, Artificial Sequence
  source: /note="Description of Artificial Sequence: Synthetic polypeptide"
EVQLVESGGGLVQPGGSLRLSCAASGYSITNDYAWNWVRQAPGKGLEWVGYISYSGYTTYNPSLKSRFTISRDTSKNTLYLQMNSLRAEDTAVYYCARWTSGLDYWGQGTLVTVSS

SEQ ID NO: 93 - protein, 9 aa, Artificial Sequence
  source: /note="Description of Artificial Sequence: Synthetic peptide"
GYSITNDYA

SEQ ID NO: 94 - protein, 7 aa, Artificial Sequence
  source: /note="Description of Artificial Sequence: Synthetic peptide"
ISYSGYT

SEQ ID NO: 95 - protein, 9 aa, Artificial Sequence
  source: /note="Description of Artificial Sequence: Synthetic peptide"
ARWTSGLDY

SEQ ID NO: 96 - protein, 214 aa, Artificial Sequence
  source: /note="Description of Artificial Sequence: Synthetic polypeptide"
DIQMTQSPSSLSASVGDRVTITCKASDLIHNWLAWYQQKPGKAPKLLIYGATSLETGVPSRFSGSGSGTDFTLTISSLQPEDFATYYCQQYWTTPFTFGQGTKVEIKRTVAAPSVFIFPPSDEQLKSGTASVVCLLNNFYPREAKVQWKVDNALQSGNSQESVTEQDSKDSTYSLSSTLTLSKADYEKHKVYACEVTHQGLSSPVTKSFNRGEC

SEQ ID NO: 97 - protein, 107 aa, Artificial Sequence
  source: /note="Description of Artificial Sequence: Synthetic polypeptide"
DIQMTQSPSSLSASVGDRVTITCKASDLIHNWLAWYQQKPGKAPKLLIYGATSLETGVPSRFSGSGSGTDFTLTISSLQPEDFATYYCQQYWTTPFTFGQGTKVEIK

SEQ ID NO: 98 - protein, 6 aa, Artificial Sequence
  source: /note="Description of Artificial Sequence: Synthetic peptide"
DLIHNW

SEQ ID NO: 99 - protein, 3 aa, Artificial Sequence
  source: /note="Description of Artificial Sequence: Synthetic peptide"
GAT

SEQ ID NO: 100 - protein, 9 aa, Artificial Sequence
  source: /note="Description of Artificial Sequence: Synthetic peptide"
QQYWTTPFT

SEQ ID NO: 101 - protein, 446 aa, Artificial Sequence
  source: /note="Description of Artificial Sequence: Synthetic polypeptide"
QVQLQQSGAELVRPGTSVKVSCKASGYAFTNYLIEWVKQRPGQGLEWIGVINPGSGGTNYNEKFKGKATLTADKSSSTAYMQLSSLTSDDSAVYFCARDGPWFAYWGQGTLVTVSAASTKGPSVFPLAPSSKSTSGGTAALGCLVKDYFPEPVTVSWNSGALTSGVHTFPAVLQSSGLYSLSSVVTVPSSSLGTQTYICNVNHKPSNTKVDKKVEPKSCDKTHTCPPCPAPELLGGPSVFLFPPKPKDTLMISRTPEVTCVVVDVSHEDPEVKFNWYVDGVEVHNAKTKPREEQYNSTYRVVSVLTVLHQDWLNGKEYKCKVSNKALPAPIEKTISKAKGQPREPQVYTLPPSREEMTKNQVSLTCLVKGFYPSDIAVEWESNGQPENNYKTTPPVLDSDGSFFLYSKLTVDKSRWQQGNVFSCSVMHEALHNHYTQKSLSLSPGK

SEQ ID NO: 102 - protein, 116 aa, Artificial Sequence
  source: /note="Description of Artificial Sequence: Synthetic polypeptide"
QVQLQQSGAELVRPGTSVKVSCKASGYAFTNYLIEWVKQRPGQGLEWIGVINPGSGGTNYNEKFKGKATLTADKSSSTAYMQLSSLTSDDSAVYFCARDGPWFAYWGQGTLVTVSA

SEQ ID NO: 103 - protein, 8 aa, Artificial Sequence
  source: /note="Description of Artificial Sequence: Synthetic peptide"
GYAFTNYL

SEQ ID NO: 104 - protein, 8 aa, Artificial Sequence
  source: /note="Description of Artificial Sequence: Synthetic peptide"
INPGSGGT

SEQ ID NO: 105 - protein, 9 aa, Artificial Sequence
  source: /note="Description of Artificial Sequence: Synthetic peptide"
ARDGPWFAY

SEQ ID NO: 106 - protein, 214 aa, Artificial Sequence
  source: /note="Description of Artificial Sequence: Synthetic polypeptide"
NIVMTQSPKSMSMSVGERVTLTCKASENVVTYVSWYQQKPEQSPKLLIYGASNRYTGVPDRFTGSGSATDFTLTISSVQAEDLADYHCGQGYSYPYTFGGGTKLEIKRTVAAPSVFIFPPSDEQLKSGTASVVCLLNNFYPREAKVQWKVDNALQSGNSQESVTEQDSKDSTYSLSSTLTLSKADYEKHKVYACEVTHQGLSSPVTKSFNRGEC

SEQ ID NO: 107 - protein, 107 aa, Artificial Sequence
  source: /note="Description of Artificial Sequence: Synthetic polypeptide"
NIVMTQSPKSMSMSVGERVTLTCKASENVVTYVSWYQQKPEQSPKLLIYGASNRYTGVPDRFTGSGSATDFTLTISSVQAEDLADYHCGQGYSYPYTFGGGTKLEIK

SEQ ID NO: 108 - protein, 6 aa, Artificial Sequence
  source: /note="Description of Artificial Sequence: Synthetic peptide"
ENVVTY

SEQ ID NO: 109 - protein, 3 aa, Artificial Sequence
  source: /note="Description of Artificial Sequence: Synthetic peptide"
GAS

SEQ ID NO: 110 - protein, 9 aa, Artificial Sequence
  source: /note="Description of Artificial Sequence: Synthetic peptide"
GQGYSYPYT

SEQ ID NO: 111 - protein, 457 aa, Artificial Sequence
  source: /note="Description of Artificial Sequence: Synthetic polypeptide"
EVQLLESGGGVVQPGRSLRLSCAASGFTFSSYGMHWVRQAPGKGLEWVAVISYDGSNKYYADSVKGRFTISRDNSKNTLYLQMNSLRAEDTAVYYCAKDMGWGSGWRPYYYYGMDVWGQGTTVTVSSASTKGPSVFPLAPSSKSTSGGTAALGCLVKDYFPEPVTVSWNSGALTSGVHTFPAVLQSSGLYSLSSVVTVPSSSLGTQTYICNVNHKPSNTKVDKKVEPKSCDKTHTCPPCPAPELLGGPSVFLFPPKPKDTLMISRTPEVTCVVVDVSHEDPEVKFNWYVDGVEVHNAKTKPREEQYNSTYRVVSVLTVLHQDWLNGKEYKCKVSNKALPAPIEKTISKAKGQPREPQVYTLPPSRDELTKNQVSLTCLVKGFYPSDIAVEWESNGQPENNYKTTPPVLDSDGSFFLYSKLTVDKSRWQQGNVFSCSVMHEALHNHYTQKSLSLSPGK

SEQ ID NO: 112 - protein, 127 aa, Artificial Sequence
  source: /note="Description of Artificial Sequence: Synthetic polypeptide"
EVQLLESGGGVVQPGRSLRLSCAASGFTFSSYGMHWVRQAPGKGLEWVAVISYDGSNKYYADSVKGRFTISRDNSKNTLYLQMNSLRAEDTAVYYCAKDMGWGSGWRPYYYYGMDVWGQGTTVTVSS

SEQ ID NO: 113 - protein, 8 aa, Artificial Sequence
  source: /note="Description of Artificial Sequence: Synthetic peptide"
GFTFSSYG

SEQ ID NO: 114 - protein, 8 aa, Artificial Sequence
  source: /note="Description of Artificial Sequence: Synthetic peptide"
ISYDGSNK

SEQ ID NO: 115 - protein, 20 aa, Artificial Sequence
  source: /note="Description of Artificial Sequence: Synthetic peptide"
AKDMGWGSGWRPYYYYGMDV

SEQ ID NO: 116 - protein, 214 aa, Artificial Sequence
  source: /note="Description of Artificial Sequence: Synthetic polypeptide"
ELQMTQSPSSLSASVGDRVTITCRTSQSISSYLNWYQQKPGQPPKLLIYWASTRESGVPDRFSGSGSGTDFTLTISSLQPEDSATYYCQQSYDIPYTFGQGTKLEIKRTVAAPSVFIFPPSDEQLKSGTASVVCLLNNFYPREAKVQWKVDNALQSGNSQESVTEQDSKDSTYSLSSTLTLSKADYEKHKVYACEVTHQGLSSPVTKSFNRGEC

SEQ ID NO: 117 - protein, 107 aa, Artificial Sequence
  source: /note="Description of Artificial Sequence: Synthetic polypeptide"
ELQMTQSPSSLSASVGDRVTITCRTSQSISSYLNWYQQKPGQPPKLLIYWASTRESGVPDRFSGSGSGTDFTLTISSLQPEDSATYYCQQSYDIPYTFGQGTKLEIK

SEQ ID NO: 118 - protein, 6 aa, Artificial Sequence
  source: /note="Description of Artificial Sequence: Synthetic peptide"
QSISSY

SEQ ID NO: 119 - protein, 3 aa, Artificial Sequence
  source: /note="Description of Artificial Sequence: Synthetic peptide"
WAS

SEQ ID NO: 120 - protein, 9 aa, Artificial Sequence
  source: /note="Description of Artificial Sequence: Synthetic peptide"
QQSYDIPYT

SEQ ID NO: 121 - protein, 450 aa, Artificial Sequence
  source: /note="Description of Artificial Sequence: Synthetic polypeptide"
QVELVQSGAEVKKPGESLKISCKGSGYSFTSYWIGWVRQAPGKGLEWMGIIDPGDSRTRYSPSFQGQVTISADKSISTAYLQWSSLKASDTAMYYCARGQLYGGTYMDGWGQGTLVTVSSASTKGPSVFPLAPSSKSTSGGTAALGCLVKDYFPEPVTVSWNSGALTSGVHTFPAVLQSSGLYSLSSVVTVPSSSLGTQTYICNVNHKPSNTKVDKKVEPKSCDKTHTCPPCPAPELLGGPSVFLFPPKPKDTLMISRTPEVTCVVVDVSHEDPEVKFNWYVDGVEVHNAKTKPREEQYNSTYRVVSVLTVLHQDWLNGKEYKCKVSNKALPAPIEKTISKAKGQPREPQVYTLPPSRDELTKNQVSLTCLVKGFYPSDIAVEWESNGQPENNYKTTPPVLDSDGSFFLYSKLTVDKSRWQQGNVFSCSVMHEALHNHYTQKSLSLSPGK

SEQ ID NO: 122 - protein, 120 aa, Artificial Sequence
  source: /note="Description of Artificial Sequence: Synthetic polypeptide"
QVELVQSGAEVKKPGESLKISCKGSGYSFTSYWIGWVRQAPGKGLEWMGIIDPGDSRTRYSPSFQGQVTISADKSISTAYLQWSSLKASDTAMYYCARGQLYGGTYMDGWGQGTLVTVSS

SEQ ID NO: 123 - protein, 8 aa, Artificial Sequence
  source: /note="Description of Artificial Sequence: Synthetic peptide"
GYSFTSYW

SEQ ID NO: 124 - protein, 8 aa, Artificial Sequence
  source: /note="Description of Artificial Sequence: Synthetic peptide"
IDPGDSRT

SEQ ID NO: 125 - protein, 13 aa, Artificial Sequence
  source: /note="Description of Artificial Sequence: Synthetic peptide"
ARGQLYGGTYMDG

SEQ ID NO: 126 - protein, 217 aa, Artificial Sequence
  source: /note="Description of Artificial Sequence: Synthetic polypeptide"
DIALTQPASVSGSPGQSITISCTGTSSDIGGYNSVSWYQQHPGKAPKLMIYGVNNRPSGVSNRFSGSKSGNTASLTISGLQAEDEADYYCSSYDIESATPVFGGGTKLTVLGQPKAAPSVTLFPPSSEELQANKATLVCLISDFYPGAVTVAWKGDSSPVKAGVETTTPSKQSNNKYAASSYLSLTPEQWKSHRSYSCQVTHEGSTVEKTVAPTECS

SEQ ID NO: 127 - protein, 111 aa, Artificial Sequence
  source: /note="Description of Artificial Sequence: Synthetic polypeptide"
DIALTQPASVSGSPGQSITISCTGTSSDIGGYNSVSWYQQHPGKAPKLMIYGVNNRPSGVSNRFSGSKSGNTASLTISGLQAEDEADYYCSSYDIESATPVFGGGTKLTVL

SEQ ID NO: 128 - protein, 9 aa, Artificial Sequence
  source: /note="Description of Artificial Sequence: Synthetic peptide"
SSDIGGYNS

SEQ ID NO: 129 - protein, 3 aa, Artificial Sequence
  source: /note="Description of Artificial Sequence: Synthetic peptide"
GVN

SEQ ID NO: 130 - protein, 11 aa, Artificial Sequence
  source: /note="Description of Artificial Sequence: Synthetic peptide"
SSYDIESATPV

SEQ ID NO: 131 - protein, 446 aa, Artificial Sequence
  source: /note="Description of Artificial Sequence: Synthetic polypeptide"
QAQLVQSGAEVVKPGASVKMSCKASGYTFTSYNMHWVKQTPGQGLEWIGYIYPGNGATNYNQKFQGKATLTADPSSSTAYMQISSLTSEDSAVYFCARGDSVPFAYWGQGTLVTVSAASTKGPSVFPLAPSSKSTSGGTAALGCLVKDYFPEPVTVSWNSGALTSGVHTFPAVLQSSGLYSLSSVVTVPSSSLGTQTYICNVNHKPSNTKVDKKVEPKSCDKTHTCPPCPAPELLGGPSVFLFPPKPKDTLMISRTPEVTCWVDVSHEDPEVKFNWYVDGVEVHNAKTKPREEQYNSTYRVVSVLTVLHQDWLNGKEYKCKVSNKALPAPIEKTISKAKGQPREPQVYTLPPSRDELTKNQVSLTCLVKGFYPSDIAVEWESNGQPENNYKTTPPVLDSDGSFFLYSKLTVDKSRWQQGNVFSCSVMHEALHNHYTQKSLSLSPGK

SEQ ID NO: 132 - protein, 117 aa, Artificial Sequence
  source: /note="Description of Artificial Sequence: Synthetic polypeptide"
QAQLVQSGAEVVKPGASVKMSCKASGYTFTSYNMHWVKQTPGQGLEWIGYIYPGNGATNYNQKFQGKATLTADPSSSTAYMQISSLTSEDSAVYFCARGDSVPFAYWGQGTLVTVSA

SEQ ID NO: 133 - protein, 8 aa, Artificial Sequence
  source: /note="Description of Artificial Sequence: Synthetic peptide"
GYTFTSYN

SEQ ID NO: 134 - protein, 8 aa, Artificial Sequence
  source: /note="Description of Artificial Sequence: Synthetic peptide"
IYPGNGAT

SEQ ID NO: 135 - protein, 10 aa, Artificial Sequence
  source: /note="Description of Artificial Sequence: Synthetic peptide"
ARGDSVPFAY

SEQ ID NO: 136 - protein, 213 aa, Artificial Sequence
  source: /note="Description of Artificial Sequence: Synthetic polypeptide"
EIVLTQSPATMSASPGERVTITCSAHSSVSFMHWFQQKPGTSPKLWIYSTSSLASGVPARFGGSGSGTSYSLTISSMEAEDAATYYCQQRSSFPLTFGAGTKLELKRTVAAPSVFIFPPSDEQLKSGTASVVCLLNNFYPREAKVQWKVDNALQSGNSQESVTEQDSKDSTYSLSSTLTLSKADYEKHKVYACEVTHQGLSSPVTKSFNRGEC

SEQ ID NO: 137 - protein, 106 aa, Artificial Sequence
  source: /note="Description of Artificial Sequence: Synthetic polypeptide"
EIVLTQSPATMSASPGERVTITCSAHSSVSFMHWFQQKPGTSPKLWIYSTSSLASGVPARFGGSGSGTSYSLTISSMEAEDAATYYCQQRSSFPLTFGAGTKLELK

SEQ ID NO: 138 - protein, 5 aa, Artificial Sequence
  source: /note="Description of Artificial Sequence: Synthetic peptide"
SSVSF

SEQ ID NO: 139 - protein, 3 aa, Artificial Sequence
  source: /note="Description of Artificial Sequence: Synthetic peptide"
STS

SEQ ID NO: 140 - protein, 9 aa, Artificial Sequence
  source: /note="Description of Artificial Sequence: Synthetic peptide"
QQRSSFPLT

SEQ ID NO: 141 - protein, 450 aa, Artificial Sequence
  source: /note="Description of Artificial Sequence: Synthetic polypeptide"
EVQLVESGGGLVQPGGSLRLSCAASGFSFSDFAMSWVRQAPGKGLEWVATIGRVAFHTYYPDSMKGRFTISRDNSKNTLYLQMNSLRAEDTAVYYCARHRGFDVGHFDFWGQGTLVTVSSASTKGPSVFPLAPSSKSTSGGTAALGCLVKDYFPEPVTVSWNSGALTSGVHTFPAVLQSSGLYSLSSVVTVPSSSLGTQTYICNVNHKPSNTKVDKKVEPKSCDKTHTCPPCPAPELLGGPSVFLFPPKPKDTLMISRTPEVTCVVVDVSHEDPEVKFNWYVDGVEVHNAKTKPREEQYNSTYRVVSVLTVLHQDWLNGKEYKCKVSNKALPAPIEKTISKAKGQPREPQVYTLPPSREEMTKNQVSLTCLVKGFYPSDIAVEWESNGQPENNYKTTPPVLDSDGSFFLYSKLTVDKSRWQQGNVFSCSVMHEALHNHYTQKSLSLSPGK

SEQ ID NO: 142 - protein, 120 aa, Artificial Sequence
  source: /note="Description of Artificial Sequence: Synthetic polypeptide"
EVQLVESGGGLVQPGGSLRLSCAASGFSFSDFAMSWVRQAPGKGLEWVATIGRVAFHTYYPDSMKGRFTISRDNSKNTLYLQMNSLRAEDTAVYYCARHRGFDVGHFDFWGQGTLVTVSS

SEQ ID NO: 143 - protein, 8 aa, Artificial Sequence
  source: /note="Description of Artificial Sequence: Synthetic peptide"
GFSFSDFA

SEQ ID NO: 144 - protein, 8 aa, Artificial Sequence
  source: /note="Description of Artificial Sequence: Synthetic peptide"
IGRVAFHT

SEQ ID NO: 145 - protein, 13 aa, Artificial Sequence
  source: /note="Description of Artificial Sequence: Synthetic peptide"
ARHRGFDVGHFDF

SEQ ID NO: 146 - protein, 219 aa, Artificial Sequence
  source: /note="Description of Artificial Sequence: Synthetic polypeptide"
DIQMTQSPSSLSASVGDRVTITCRSSETLVHSSGNTYLEWYQQKPGKAPKLLIYRVSNRFSGVPSRFSGSGSGTDFTLTISSLQPEDFATYYCFQGSFNPLTFGQGTKVEIKRTVAAPSVFIFPPSDEQLKSGTASVVCLLNNFYPREAKVQWKVDNALQSGNSQESVTEQDSKDSTYSLSSTLTLSKADYEKHKVYACEVTHQGLSSPVTKSFNRGEC

SEQ ID NO: 147 - protein, 112 aa, Artificial Sequence
  source: /note="Description of Artificial Sequence: Synthetic polypeptide"
DIQMTQSPSSLSASVGDRVTITCRSSETLVHSSGNTYLEWYQQKPGKAPKLLIYRVSNRFSGVPSRFSGSGSGTDFTLTISSLQPEDFATYYCFQGSFNPLTFGQGTKVEIK

SEQ ID NO: 148 - protein, 11 aa, Artificial Sequence
  source: /note="Description of Artificial Sequence: Synthetic peptide"
ETLVHSSGNTY

SEQ ID NO: 149 - protein, 3 aa, Artificial Sequence
  source: /note="Description of Artificial Sequence: Synthetic peptide"
RVS

SEQ ID NO: 150 - protein, 9 aa, Artificial Sequence
  source: /note="Description of Artificial Sequence: Synthetic peptide"
FQGSFNPLT

SEQ ID NO: 151 - protein, 451 aa, Artificial Sequence
  source: /note="Description of Artificial Sequence: Synthetic polypeptide"
QVQLQQSGSELKKPGASVKVSCKASGYTFTNYGMNWVKQAPGQGLKWMGWINTYTGEPTYTDDFKGRFAFSLDTSVSTAYLQISSLKADDTAVYFCARGGFGSSYWYFDVWGQGSLVTVSSASTKGPSVFPLAPSSKSTSGGTAALGCLVKDYFPEPVTVSWNSGALTSGVHTFPAVLQSSGLYSLSSVVTVPSSSLGTQTYICNVNHKPSNTKVDKRVEPKSCDKTHTCPPCPAPELLGGPSVFLFPPKPKDTLMISRTPEVTCVVVDVSHEDPEVKFNWYVDGVEVHNAKTKPREEQYNSTYRVVSVLTVLHQDWLNGKEYKCKVSNKALPAPIEKTISKAKGQPREPQVYTLPPSREEMTKNQVSLTCLVKGFYPSDIAVEWESNGQPENNYKTTPPVLDSDGSFFLYSKLTVDKSRWQQGNVFSCSVMHEALHNHYTQKSLSLSPGK

SEQ ID NO: 152 - protein, 121 aa, Artificial Sequence
  source: /note="Description of Artificial Sequence: Synthetic polypeptide"
QVQLQQSGSELKKPGASVKVSCKASGYTFTNYGMNWVKQAPGQGLKWMGWINTYTGEPTYTDDFKGRFAFSLDTSVSTAYLQISSLKADDTAVYFCARGGFGSSYWYFDVWGQGSLVTVSS

SEQ ID NO: 153 - protein, 8 aa, Artificial Sequence
  source: /note="Description of Artificial Sequence: Synthetic peptide"
GYTFTNYG

SEQ ID NO: 154 - protein, 8 aa, Artificial Sequence
  source: /note="Description of Artificial Sequence: Synthetic peptide"
INTYTGEP

SEQ ID NO: 155 - protein, 14 aa, Artificial Sequence
  source: /note="Description of Artificial Sequence: Synthetic peptide"
ARGGFGSSYWYFDV

SEQ ID NO: 156 - protein, 214 aa, Artificial Sequence
  source: /note="Description of Artificial Sequence: Synthetic polypeptide"
DIQLTQSPSSLSASVGDRVSITCKASQDVSIAVAWYQQKPGKAPKLLIYSASYRYTGVPDRFSGSGSGTDFTLTISSLQPEDFAVYYCQQHYITPLTFGAGTKVEIKRTVAAPSVFIFPPSDEQLKSGTASVVCLLNNFYPREAKVQWKVDNALQSGNSQESVTEQDSKDSTYSLSSTLTLSKADYEKHKVYACEVTHQGLSSPVTKSFNRGEC

SEQ ID NO: 157 - protein, 107 aa, Artificial Sequence
  source: /note="Description of Artificial Sequence: Synthetic polypeptide"
DIQLTQSPSSLSASVGDRVSITCKASQDVSIAVAWYQQKPGKAPKLLIYSASYRYTGVPDRFSGSGSGTDFTLTISSLQPEDFAVYYCQQHYITPLTFGAGTKVEIK

SEQ ID NO: 158 - protein, 6 aa, Artificial Sequence
  source: /note="Description of Artificial Sequence: Synthetic peptide"
QDVSIA

SEQ ID NO: 159 - protein, 3 aa, Artificial Sequence
  source: /note="Description of Artificial Sequence: Synthetic peptide"
SAS

SEQ ID NO: 160 - protein, 9 aa, Artificial Sequence
  source: /note="Description of Artificial Sequence: Synthetic peptide"
QQHYITPLT

SEQ ID NO: 161 - protein, 451 aa, Artificial Sequence
  source: /note="Description of Artificial Sequence: Synthetic polypeptide"
QVKLQQSGPELKKPGETVKISCKASGYTFTEFGMNWVKQAPGKGLKWMGWINTKTGEATYVEEFKGRFAFSLETSATTAYLQINNLKNEDTAKYFCARWDFYDYVEAMDYWGQGTTVTVSSASTKGPSVFPLAPSSKSTSGGTAALGCLVKDYFPEPVTVSWNSGALTSGVHTFPAVLQSSGLYSLSSVVTVPSSSLGTQTYICNVNHKPSNTKVDKKVEPKSCDKTHTCPPCPAPELLGGPSVFLFPPKPKDTLMISRTPEVTCVVVDVSHEDPEVKFNWYVDGVEVHNAKTKPREEQYNSTYRVVSVLTVLHQDWLNGKEYKCKVSNKALPAPIEKTISKAKGQPREPQVYTLPPSRDELTKNQVSLTCLVKGFYPSDIAVEWESNGQPENNYKTTPPVLDSDGSFFLYSKLTVDKSRWQQGNVFSCSVMHEALHNHYTQKSLSLSPGK

SEQ ID NO: 162 - protein, 121 aa, Artificial Sequence
  source: /note="Description of Artificial Sequence: Synthetic polypeptide"
QVKLQQSGPELKKPGETVKISCKASGYTFTEFGMNWVKQAPGKGLKWMGWINTKTGEATYVEEFKGRFAFSLETSATTAYLQINNLKNEDTAKYFCARWDFYDYVEAMDYWGQGTTVTVSS

SEQ ID NO: 163 - protein, 8 aa, Artificial Sequence
  source: /note="Description of Artificial Sequence: Synthetic peptide"
GYTFTEFG

SEQ ID NO: 164 - protein, 8 aa, Artificial Sequence
  source: /note="Description of Artificial Sequence: Synthetic peptide"
INTKTGEA

SEQ ID NO: 165 - protein, 14 aa, Artificial Sequence
  source: /note="Description of Artificial Sequence: Synthetic peptide"
ARWDFYDYVEAMDY

SEQ ID NO: 166 - protein, 215 aa, Artificial Sequence
  source: /note="Description of Artificial Sequence: Synthetic polypeptide"
DIVMTQSQRFMSTSVGDRVSVTCKASQNVGTNVAWYQQKPGQSPKALIYSASYRYSGVPDRFTGSGSGTDFTLTISNVQSEDLAEYFCHQYYTYPLFTFGSGTKLEMKRTVAAPSVFIFPPSDEQLKSGTASVVCLLNNFYPREAKVQWKVDNALQSGNSQESVTEQDSKDSTYSLSSTLTLSKADYEKHKVYACEVTHQGLSSPVTKSFNRGEC

SEQ ID NO: 167 - protein, 108 aa, Artificial Sequence
  source: /note="Description of Artificial Sequence: Synthetic polypeptide"
DIVMTQSQRFMSTSVGDRVSVTCKASQNVGTNVAWYQQKPGQSPKALIYSASYRYSGVPDRFTGSGSGTDFTLTISNVQSEDLAEYFCHQYYTYPLFTFGSGTKLEMK

SEQ ID NO: 168 - protein, 6 aa, Artificial Sequence
  source: /note="Description of Artificial Sequence: Synthetic peptide"
QNVGTN

SEQ ID NO: 169 - protein, 3 aa, Artificial Sequence
  source: /note="Description of Artificial Sequence: Synthetic peptide"
SAS

SEQ ID NO: 170 - protein, 10 aa, Artificial Sequence
  source: /note="Description of Artificial Sequence: Synthetic peptide"
HQYYTYPLFT

SEQ ID NO: 171 - protein, 451 aa, Artificial Sequence
  source: /note="Description of Artificial Sequence: Synthetic polypeptide"
QVQLVQSGAEVKKPGASVKVSCKASGYTFTEFGMNWVRQAPGQGLEWMGWINTKTGEATYVEEFKGRVTFTTDTSTSTAYMELRSLRSDDTAVYYCARWDFAYYVEAMDYWGQGTTVTVSSASTKGPSVFPLAPSSKSTSGGTAALGCLVKDYFPEPVTVSWNSGALTSGVHTFPAVLQSSGLYSLSSVVTVPSSSLGTQTYICNVNHKPSNTKVDKKVEPKSCDKTHTCPPCPAPELLGGPSVFLFPPKPKDTLMISRTPEVTCVVVDVSHEDPEVKFNWYVDGVEVHNAKTKPREEQYNSTYRVVSVLTVLHQDWLNGKEYKCKVSNKALPAPIEKTISKAKGQPREPQVYTLPPSREEMTKNQVSLTCLVKGFYPSDIAVEWESNGQPENNYKTTPPVLDSDGSFFLYSKLTVDKSRWQQGNVFSCSVMHEALHNHYTQKSLSLSPGK

SEQ ID NO: 172 - protein, 121 aa, Artificial Sequence
  source: /note="Description of Artificial Sequence: Synthetic polypeptide"
QVQLVQSGAEVKKPGASVKVSCKASGYTFTEFGMNWVRQAPGQGLEWMGWINTKTGEATYVEEFKGRVTFTTDTSTSTAYMELRSLRSDDTAVYYCARWDFAYYVEAMDYWGQGTTVTVSS

SEQ ID NO: 173 - protein, 8 aa, Artificial Sequence
  source: /note="Description of Artificial Sequence: Synthetic peptide"
GYTFTEFG

SEQ ID NO: 174 - protein, 8 aa, Artificial Sequence
  source: /note="Description of Artificial Sequence: Synthetic peptide"
INTKTGEA

SEQ ID NO: 175 - protein, 14 aa, Artificial Sequence
  source: /note="Description of Artificial Sequence: Synthetic peptide"
ARWDFAYYVEAMDY

SEQ ID NO: 176 - protein, 215 aa, Artificial Sequence
  source: /note="Description of Artificial Sequence: Synthetic polypeptide"
DIQMTQSPSSLSASVGDRVTITCKASAAVGTYVAWYQQKPGKAPKLLIYSASYRKRGVPSRFSGSGSGTDFTLTISSLQPEDFATYYCHQYYTYPLFTFGQGTKLEIKRTVAAPSVFIFPPSDEQLKSGTASVVCLLNNFYPREAKVQWKVDNALQSGNSQESVTEQDSKDSTYSLSSTLTLSKADYEKHKVYACEVTHQGLSSPVTKSFNRGEC

SEQ ID NO: 177 - protein, 108 aa, Artificial Sequence
  source: /note="Description of Artificial Sequence: Synthetic polypeptide"
DIQMTQSPSSLSASVGDRVTITCKASAAVGTYVAWYQQKPGKAPKLLIYSASYRKRGVPSRFSGSGSGTDFTLTISSLQPEDFATYYCHQYYTYPLFTFGQGTKLEIK

SEQ ID NO: 178 - protein, 6 aa, Artificial Sequence
  source: /note="Description of Artificial Sequence: Synthetic peptide"
AAVGTY

SEQ ID NO: 179 - protein, 3 aa, Artificial Sequence
  source: /note="Description of Artificial Sequence: Synthetic peptide"
SAS

SEQ ID NO: 180 - protein, 10 aa, Artificial Sequence
  source: /note="Description of Artificial Sequence: Synthetic peptide"
HQYYTYPLFT

SEQ ID NO: 181 - protein, 450 aa, Artificial Sequence
  source: /note="Description of Artificial Sequence: Synthetic polypeptide"
EVQLQESGPGLVKPGGSLSLSCAASGFVFSSYDMSWVRQTPERGLEWVAYISSGGGITYAPSTVKGRFTVSRDNAKNTLYLQMNSLTSEDTAVYYCAAHYFGSSGPFAYWGQGTLVTVSSASTKGPSVFPLAPSSKSTSGGTAALGCLVKDYFPEPVTVSWNSGALTSGVHTFPAVLQSSGLYSLSSVVTVPSSSLGTQTYICNVNHKPSNTKVDKKVEPKSCDKTHTCPPCPAPELLGGPSVFLFPPKPKDTLMISRTPEVTCVVVDVSHEDPEVKFNWYVDGVEVHNAKTKPREEQYNSTYRVVSVLTVLHQDWLNGKEYKCKVSNKALPAPIEKTISKAKGQPREPQVYTLPPSREEMTKNQVSLTCLVKGFYPSDIAVEWESNGQPENNYKTTPPVLDSDGSFFLYSKLTVDKSRWQQGNVFSCSVMHEALHNHYTQKSLSLSPGK

SEQ ID NO: 182 - protein, 120 aa, Artificial Sequence [sequence omitted]

SEQ ID NO: 183 - protein, 8 aa, Artificial Sequence
  source: /note="Description of Artificial Sequence: Synthetic peptide"
GFVFSSYD

SEQ ID NO: 184 - protein, 9 aa, Artificial Sequence
  source: /note="Description of Artificial Sequence: Synthetic peptide"
YISSGGGIT

SEQ ID NO: 185 - protein, 13 aa, Artificial Sequence
  source: /note="Description of Artificial Sequence: Synthetic peptide"
AAHYFGSSGPFAY

SEQ ID NO: 186 - protein, 214 aa, Artificial Sequence
  source: /note="Description of Artificial Sequence: Synthetic polypeptide"
DIQMTQSPASLSASVGDRVTITCRASENIFSYLAWYQQKPGKSPKLLVYNTRTLAEGVPSRFSGSGSGTDFSLTISSLQPEDFATYYCQHHYGTPFTFGSGTKLEIKRTVAAPSVFIFPPSDEQLKSGTASVVCLLNNFYPREAKVQWKVDNALQSGNSQESVTEQDSKDSTYSLSSTLTLSKADYEKHKVYACEVTHQGLSSPVTKSFNRGEC

SEQ ID NO: 187 - protein, 107 aa, Artificial Sequence [sequence omitted]

SEQ ID NO: 188 - protein, 6 aa, Artificial Sequence
  source: /note="Description of Artificial Sequence: Synthetic peptide"
ENIFSY

SEQ ID NO: 189 - protein, 3 aa, Artificial Sequence
  source: /note="Description of Artificial Sequence: Synthetic peptide"
NTR

SEQ ID NO: 190 - protein, 9 aa, Artificial Sequence
  source: /note="Description of Artificial Sequence: Synthetic peptide"
QHHYGTPFT

SEQ ID NO: 191 - protein, 448 aa, Artificial Sequence
  source: /note="Description of Artificial Sequence: Synthetic polypeptide"
QVQLQQPGAELVRPGASVKLSCKASGYTFTSYWINWVKQRPGQGLEWIGNIYPSDSYTNYNQKFKDKATLTVDKSSSTAYMQLSSPTSEDSAVYYCTRSWRGNSFDYWGQGTTLTVSSASTKGPSVFPLAPSSKSTSGGTAALGCLVKDYFPEPVTVSWNSGALTSGVHTFPAVLQSSGLYSLSSVVTVPSSSLGTQTYICNVNHKPSNTKVDKKVEPKSCDKTHTCPPCPAPELLGGPSVFLFPPKPKDTLMISRTPEVTCVVVDVSHEDPEVKFNWYVDGVEVHNAKTKPREEQYNSTYRVVSVLTVLHQDWLNGKEYKCKVSNKALPAPIEKTISKAKGQPREPQVYTLPPSREEMTKNQVSLTCLVKGFYPSDIAVEWESNGQPENNYKTTPPVLDSDGSFFLYSKLTVDKSRWQQGNVFSCSVMHEALHNHYTQKSLSLSPGK

SEQ ID NO: 192 - protein, 118 aa, Artificial Sequence
  source: /note="Description of Artificial Sequence: Synthetic polypeptide"
QVQLQQPGAELVRPGASVKLSCKASGYTFTSYWINWVKQRPGQGLEWIGNIYPSDSYTNYNQKFKDKATLTVDKSSSTAYMQLSSPTSEDSAVYYCTRSWRGNSFDYWGQGTTLTVSS

SEQ ID NO: 193 - protein, 8 aa, Artificial Sequence
  source: /note="Description of Artificial Sequence: Synthetic peptide"
GYTFTSYW

SEQ ID NO: 194 - protein, 8 aa, Artificial Sequence
  source: /note="Description of Artificial Sequence: Synthetic peptide"
IYPSDSYT

SEQ ID NO: 195 - protein, 11 aa, Artificial Sequence
  source: /note="Description of Artificial Sequence: Synthetic peptide"
TRSWRGNSFDY

SEQ ID NO: 196 - protein, 220 aa, Artificial Sequence
  source: /note="Description of Artificial Sequence: Synthetic polypeptide"
DIVMTQSPSSLTVTAGEKVTMSCKSSQSLLNSGNQKNYLTWYQQKPGQPPKLLIYWASTRESGVPDRFTGSGSGTDFTLTISSVQAEDLAVYYCQNDYSYPFTFGSGTKLEIKRTVAAPSVFIFPPSDEQLKSGTASVVCLLNNFYPREAKVQWKVDNALQSGNSQESVTEQDSKDSTYSLSSTLTLSKADYEKHKVYACEVTHQGLSSPVTKSFNRGEC

SEQ ID NO: 197 - protein, 113 aa, Artificial Sequence
  source: /note="Description of Artificial Sequence: Synthetic polypeptide"
DIVMTQSPSSLTVTAGEKVTMSCKSSQSLLNSGNQKNYLTWYQQKPGQPPKLLIYWASTRESGVPDRFTGSGSGTDFTLTISSVQAEDLAVYYCQNDYSYPFTFGSGTKLEIK

SEQ ID NO: 198 - protein, 12 aa, Artificial Sequence
  source: /note="Description of Artificial Sequence: Synthetic peptide"
QSLLNSGNQKNY

SEQ ID NO: 199 - protein, 3 aa, Artificial Sequence
  source: /note="Description of Artificial Sequence: Synthetic peptide"
WAS

SEQ ID NO: 200 - protein, 9 aa, Artificial Sequence
  source: /note="Description of Artificial Sequence: Synthetic peptide"
QNDYSYPFT

SEQ ID NO: 201 - protein, 454 aa, Artificial Sequence
  source: /note="Description of Artificial Sequence: Synthetic polypeptide"
QVQLVESGGGVVQSGRSLRLSCAASGFTFRNYGMHWVRQAPGKGLEWVAVIWYDGSDKYYADSVRGRFTISRDNSKNTLYLQMNSLRAEDTAVYYCARDGYDILTGNPRDFDYWGQGTLVTVSSASTKGPSVFPLAPSSKSTSGGTAALGCLVKDYFPEPVTVSWNSGALTSGVHTFPAVLQSSGLYSLSSVVTVPSSSLGTQTYICNVNHKPSNTKVDKKVEPKSCDKTHTCPPCPAPELLGGPSVFLFPPKPKDTLMISRTPEVTCVVVDVSHEDPEVKFNWYVDGVEVHNAKTKPREEQYNSTYRVVSVLTVLHQDWLNGKEYKCKVSNKALPAPIEKTISKAKGQPREPQVYTLPPSREEMTKNQVSLTCLVKGFYPSDIAVEWESNGQPENNYKTTPPVLDSDGSFFLYSKLTVDKSRWQQGNVFSCSVMHEALHNHYTQKSLSLSPGK

SEQ ID NO: 202 - protein, 124 aa, Artificial Sequence
  source: /note="Description of Artificial Sequence: Synthetic polypeptide"
QVQLVESGGGVVQSGRSLRLSCAASGFTFRNYGMHWVRQAPGKGLEWVAVIWYDGSDKYYADSVRGRFTISRDNSKNTLYLQMNSLRAEDTAVYYCARDGYDILTGNPRDFDYWGQGTLVTVSS

SEQ ID NO: 203 - protein, 8 aa, Artificial Sequence
  source: /note="Description of Artificial Sequence: Synthetic peptide"
GFTFRNYG

SEQ ID NO: 204 - protein, 8 aa, Artificial Sequence
  source: /note="Description of Artificial Sequence: Synthetic peptide"
IWYDGSDK

SEQ ID NO: 205 - protein, 17 aa, Artificial Sequence
  source: /note="Description of Artificial Sequence: Synthetic peptide"
ARDGYDILTGNPRDFDY

SEQ ID NO: 206 - protein, 219 aa, Artificial Sequence
  source: /note="Description of Artificial Sequence: Synthetic polypeptide"
DTVMTQTPLSSHVTLGQPASISCRSSQSLVHSDGNTYLSWLQQRPGQPPRLLIYRISRRFSGVPDRFSGSGAGTDFTLEISRVEAEDVGVYYCMQSTHVPRTFGQGTKVEIKRTVAAPSVFIFPPSDEQLKSGTASVVCLLNNFYPREAKVQWKVDNALQSGNSQESVTEQDSKDSTYSLSSTLTLSKADYEKHKVYACEVTHQGLSSPVTKSFNRGEC

SEQ ID NO: 207 - protein, 112 aa, Artificial Sequence
  source: /note="Description of Artificial Sequence: Synthetic polypeptide"
DTVMTQTPLSSHVTLGQPASISCRSSQSLVHSDGNTYLSWLQQRPGQPPRLLIYRISRRFSGVPDRFSGSGAGTDFTLEISRVEAEDVGVYYCMQSTHVPRTFGQGTKVEIK

SEQ ID NO: 208 - protein, 11 aa, Artificial Sequence
  source: /note="Description of Artificial Sequence: Synthetic peptide"
QSLVHSDGNTY

SEQ ID NO: 209 - protein, 3 aa, Artificial Sequence
  source: /note="Description of Artificial Sequence: Synthetic peptide"
RIS

SEQ ID NO: 210 - protein, 9 aa, Artificial Sequence
  source: /note="Description of Artificial Sequence: Synthetic peptide"
MQSTHVPRT

SEQ ID NO: 211 - protein, 446 aa, Artificial Sequence
  source: /note="Description of Artificial Sequence: Synthetic polypeptide"
EVQLQESGPGLVKPSQTLSLTCTVSGYSISRDFAWNWIRQPPGKGLEWMGYISYNGNTRYQPSLKSRITISRDTSKNQFFLKLNSVTAADTATYYCVTASRGFPYWGQGTLVTVSSASTKGPSVFPLAPSSKSTSGGTAALGCLVKDYFPEPVTVSWNSGALTSGVHTFPAVLQSSGLYSLSSVVTVPSSSLGTQTYICNVNHKPSNTKVDKKVEPKSCDKTHTCPPCPAPELLGGPSVFLFPPKPKDTLMISRTPEVTCVVVDVSHEDPEVKFNWYVDGVEVHNAKTKPREEQYNSTYRVVSVLTVLHQDWLNGKEYKCKVSNKALPAPIEKTISKAKGQPREPQVYTLPPSREEMTKNQVSLTCLVKGFYPSDIAVEWESNGQPENNYKTTPPVLDSDGSFFLYSKLTVDKSRWQQGNVFSCSVMHEALHNHYTQKSLSLSPGK

SEQ ID NO: 212 - protein, 116 aa, Artificial Sequence
  source: /note="Description of Artificial Sequence: Synthetic polypeptide"
EVQLQESGPGLVKPSQTLSLTCTVSGYSISRDFAWNWIRQPPGKGLEWMGYISYNGNTRYQPSLKSRITISRDTSKNQFFLKLNSVTAADTATYYCVTASRGFPYWGQGTLVTVSS

SEQ ID NO: 213 - protein, 9 aa, Artificial Sequence
  source: /note="Description of Artificial Sequence: Synthetic peptide"
GYSISRDFA

SEQ ID NO: 214 - protein, 7 aa, Artificial Sequence
  source: /note="Description of Artificial Sequence: Synthetic peptide"
ISYNGNT

SEQ ID NO: 215 - protein, 9 aa, Artificial Sequence
  source: /note="Description of Artificial Sequence: Synthetic peptide"
VTASRGFPY

SEQ ID NO: 216 - protein, 214 aa, Artificial Sequence
  source: /note="Description of Artificial Sequence: Synthetic polypeptide"
DIQMTQSPSSMSVSVGDRVTITCHSSQDINSNIGWLQQKPGKSFKGLIYHGTNLDDGVPSRFSGSGSGTDYTLTISSLQPEDFATYYCVQYAQFPWTFGGGTKLEIKRTVAAPSVFIFPPSDEQLKSGTASVVCLLNNFYPREAKVQWKVDNALQSGNSQESVTEQDSKDSTYSLSSTLTLSKADYEKHKVYACEVTHQGLSSPVTKSFNRGEC

SEQ ID NO: 217 - protein, 107 aa, Artificial Sequence
  source: /note="Description of Artificial Sequence: Synthetic polypeptide"
DIQMTQSPSSMSVSVGDRVTITCHSSQDINSNIGWLQQKPGKSFKGLIYHGTNLDDGVPSRFSGSGSGTDYTLTISSLQPEDFATYYCVQYAQFPWTFGGGTKLEIK

SEQ ID NO: 218 - protein, 6 aa, Artificial Sequence
  source: /note="Description of Artificial Sequence: Synthetic peptide"
QDINSN

SEQ ID NO: 219 - protein, 3 aa, Artificial Sequence
  source: /note="Description of Artificial Sequence: Synthetic peptide"
HGT

SEQ ID NO: 220 - protein, 9 aa, Artificial Sequence
  source: /note="Description of Artificial Sequence: Synthetic peptide"
VQYAQFPWT

SEQ ID NO: 221 - protein, 454 aa, Artificial Sequence
  source: /note="Description of Artificial Sequence: Synthetic polypeptide"
QVQLVQSGAEVKKPGASVKVSCKTSRYTFTEYTIHWVRQAPGQRLEWIGGINPNNGIPNYNQKFKGRVTITVDTSASTAYMELSSLRSEDTAVYYCARRRIAYGYDEGHAMDYWGQGTLVTVSSASTKGPSVFPLAPSSKSTSGGTAALGCLVKDYFPEPVTVSWNSGALTSGVHTFPAVLQSSGLYSLSSVVTVPSSSLGTQTYICNVNHKPSNTKVDKKVEPKSCDKTHTCPPCPAPELLGGPSVFLFPPKPKDTLMISRTPEVTCVVVDVSHEDPEVKFNWYVDGVEVHNAKTKPREEQYNSTYRVVSVLTVLHQDWLNGKEYKCKVSNKALPAPIEKTISKAKGQPREPQVYTLPPSREEMTKNQVSLTCLVKGFYPSDIAVEWESNGQPENNYKTTPPVLDSDGSFFLYSKLTVDKSRWQQGNVFSCSVMHEALHNHYTQKSLSLSPGK

SEQ ID NO: 222 - protein, 124 aa, Artificial Sequence
  source: /note="Description of Artificial Sequence: Synthetic polypeptide"
QVQLVQSGAEVKKPGASVKVSCKTSRYTFTEYTIHWVRQAPGQRLEWIGGINPNNGIPNYNQKFKGRVTITVDTSASTAYMELSSLRSEDTAVYYCARRRIAYGYDEGHAMDYWGQGTLVTVSS

SEQ ID NO: 223 - protein, 8 aa, Artificial Sequence
  source: /note="Description of Artificial Sequence: Synthetic peptide"
RYTFTEYT

SEQ ID NO: 224 - protein, 8 aa, Artificial Sequence
  source: /note="Description of Artificial Sequence: Synthetic peptide"
INPNNGIP

SEQ ID NO: 225 - protein, 17 aa, Artificial Sequence
  source: /note="Description of Artificial Sequence: Synthetic peptide"
ARRRIAYGYDEGHAMDY

SEQ ID NO: 226 - protein, 220 aa, Artificial Sequence
  source: /note="Description of Artificial Sequence: Synthetic polypeptide"
DIVMTQSPDSLAVSLGERATINCKSSQSLLYSRNQKNYLAWYQQKPGQPPKLLIFWASTRESGVPDRFSGSGFGTDFTLTISSLQAEDVAVYYCQQYFSYPLTFGQGTKVEIKRTVAAPSVFIFPPSDEQLKSGTASVVCLLNNFYPREAKVQWKVDNALQSGNSQESVTEQDSKDSTYSLSSTLTLSKADYEKHKVYACEVTHQGLSSPVTKSFNRGEC

SEQ ID NO: 227 - protein, 113 aa, Artificial Sequence
  source: /note="Description of Artificial Sequence: Synthetic polypeptide"
DIVMTQSPDSLAVSLGERATINCKSSQSLLYSRNQKNYLAWYQQKPGQPPKLLIFWASTRESGVPDRFSGSGFGTDFTLTISSLQAEDVAVYYCQQYFSYPLTFGQGTKVEIK

SEQ ID NO: 228 - protein, 12 aa, Artificial Sequence
  source: /note="Description of Artificial Sequence: Synthetic peptide"
QSLLYSRNQKNY

SEQ ID NO: 229 - protein, 3 aa, Artificial Sequence
  source: /note="Description of Artificial Sequence: Synthetic peptide"
WAS

SEQ ID NO: 230 - protein, 9 aa, Artificial Sequence
  source: /note="Description of Artificial Sequence: Synthetic peptide"
QQYFSYPLT

SEQ ID NO: 231 - protein, 449 aa, Artificial Sequence
  source: /note="Description of Artificial Sequence: Synthetic polypeptide"
QVQLVQSGAEVKKPGASVKVSCKASGYTFIDYSMHWVRQAPGQGLEWMGWINTYTGEPTYSDDFKGRVTITADTSTSTAYLELSSLRSEDTAVYYCATYYRYERDFDYWGQGTLVTVSSASTKGPSVFPLAPSSKSTSGGTAALGCLVKDYFPEPVTVSWNSGALTSGVHTFPAVLQSSGLYSLSSVVTVPSSSLGTQTYICNVNHKPSNTKVDKKVEPKSCDKTHTCPPCPAPELLGGPSVFLFPPKPKDTLMISRTPEVTCVVVDVSHEDPEVKFNWYVDGVEVHNAKTKPREEQYNSTYRVVSVLTVLHQDWLNGKEYKCKVSNKALPAPIEKTISKAKGQPREPQVYTLPPSREEMTKNQVSLTCLVKGFYPSDIAVEWESNGQPENNYKTTPPVLDSDGSFFLYSKLTVDKSRWQQGNVFSCSVMHEALHNHYTQKSLSLSPGK

SEQ ID NO: 232 - protein, 119 aa, Artificial Sequence
  source: /note="Description of Artificial Sequence: Synthetic polypeptide"
QVQLVQSGAEVKKPGASVKVSCKASGYTFIDYSMHWVRQAPGQGLEWMGWINTYTGEPTYSDDFKGRVTITADTSTSTAYLELSSLRSEDTAVYYCATYYRYERDFDYWGQGTLVTVSS

SEQ ID NO: 233 - protein, 8 aa, Artificial Sequence
  source: /note="Description of Artificial Sequence: Synthetic peptide"
GYTFIDYS

SEQ ID NO: 234 - protein, 8 aa, Artificial Sequence
  source: /note="Description of Artificial Sequence: Synthetic peptide"
INTYTGEP

SEQ ID NO: 235 - protein, 12 aa, Artificial Sequence
  source: /note="Description of Artificial Sequence: Synthetic peptide"
ATYYRYERDFDY

SEQ ID NO: 236 - protein, 219 aa, Artificial Sequence
  source: /note="Description of Artificial Sequence: Synthetic polypeptide"
DIVMTQSPLSLPVTPGEPASISCRSSQSIVHSSGITYLEWYLQKPGQSPQLLIYKVSNRFSGVPDRFSGSGSGTDFTLKISRVEAEDVGVYYCFQGSHVPYTFGQGTKVEIKRTVAAPSVFIFPPSDEQLKSGTASVVCLLNNFYPREAKVQWKVDNALQSGNSQESVTEQDSKDSTYSLSSTLTLSKADYEKHKVYACEVTHQGLSSPVTKSFNRGEC

SEQ ID NO: 237 - protein, 112 aa, Artificial Sequence
  source: /note="Description of Artificial Sequence: Synthetic polypeptide"
DIVMTQSPLSLPVTPGEPASISCRSSQSIVHSSGITYLEWYLQKPGQSPQLLIYKVSNRFSGVPDRFSGSGSGTDFTLKISRVEAEDVGVYYCFQGSHVPYTFGQGTKVEIK

SEQ ID NO: 238 - protein, 11 aa, Artificial Sequence
  source: /note="Description of Artificial Sequence: Synthetic peptide"
QSIVHSSGITY

SEQ ID NO: 239 - protein, 3 aa, Artificial Sequence
  source: /note="Description of Artificial Sequence: Synthetic peptide"
KVS

SEQ ID NO: 240 - protein, 9 aa, Artificial Sequence
  source: /note="Description of Artificial Sequence: Synthetic peptide"
FQGSHVPYT

SEQ ID NO: 241 - protein, 449 aa, Artificial Sequence
  source: /note="Description of Artificial Sequence: Synthetic polypeptide"
QIQLVQSGAEVKKPGASVKVSCKASGYTFIDYSMHWVRQAPGQGLKWMGWINTYTGEPTYSDDFKGRFAFSLDTSTSTAYLELSSLRSEDTAVYYCATYYRYERDFDYWGQGTLVTVSSASTKGPSVFPLAPSSKSTSGGTAALGCLVKDYFPEPVTVSWNSGALTSGVHTFPAVLQSSGLYSLSSVVTVPSSSLGTQTYICNVNHKPSNTKVDKKVEPKSCDKTHTCPPCPAPELLGGPSVFLFPPKPKDTLMISRTPEVTCVVVDVSHEDPEVKFNWYVDGVEVHNAKTKPREEQYNSTYRVVSVLTVLHQDWLNGKEYKCKVSNKALPAPIEKTISKAKGQPREPQVYTLPPSREEMTKNQVSLTCLVKGFYPSDIAVEWESNGQPENNYKTTPPVLDSDGSFFLYSKLTVDKSRWQQGNVFSCSVMHEALHNHYTQKSLSLSPGK

SEQ ID NO: 242 - protein, 119 aa, Artificial Sequence
  source: /note="Description of Artificial Sequence: Synthetic polypeptide"
QIQLVQSGAEVKKPGASVKVSCKASGYTFIDYSMHWVRQAPGQGLKWMGWINTYTGEPTYSDDFKGRFAFSLDTSTSTAYLELSSLRSEDTAVYYCATYYRYERDFDYWGQGTLVTVSS

SEQ ID NO: 243 - protein, 8 aa, Artificial Sequence
  source: /note="Description of Artificial Sequence: Synthetic peptide"
GYTFIDYS

SEQ ID NO: 244 - protein, 8 aa, Artificial Sequence
  source: /note="Description of Artificial Sequence: Synthetic peptide"
INTYTGEP

SEQ ID NO: 245 - protein, 12 aa, Artificial Sequence
  source: /note="Description of Artificial Sequence: Synthetic peptide"
ATYYRYERDFDY

SEQ ID NO: 246 - protein, 219 aa, Artificial Sequence
  source: /note="Description of Artificial Sequence: Synthetic polypeptide"
DVLMTQSPLSLPVTPGEPASISCRSSQSIVHSSGITYLEWYLQKPGQSPQLLIYKVSNRFSGVPDRFSGSGSGTDFTLKISRVEAEDVGVYYCFQGSHVPYTFGQGTKVEIKRTVAAPSVFIFPPSDEQLKSGTASVVCLLNNFYPREAKVQWKVDNALQSGNSQESVTEQDSKDSTYSLSSTLTLSKADYEKHKVYACEVTHQGLSSPVTKSFNRGEC

SEQ ID NO: 247 - protein, 112 aa, Artificial Sequence
  source: /note="Description of Artificial Sequence: Synthetic polypeptide"
DVLMTQSPLSLPVTPGEPASISCRSSQSIVHSSGITYLEWYLQKPGQSPQLLIYKVSNRFSGVPDRFSGSGSGTDFTLKISRVEAEDVGVYYCFQGSHVPYTFGQGTKVEIK

SEQ ID NO: 248 - protein, 11 aa, Artificial Sequence
  source: /note="Description of Artificial Sequence: Synthetic peptide"
QSIVHSSGITY

SEQ ID NO: 249 - protein, 3 aa, Artificial Sequence
  source: /note="Description of Artificial Sequence: Synthetic peptide"
KVS

SEQ ID NO: 250 - protein, 9 aa, Artificial Sequence
  source: /note="Description of Artificial Sequence: Synthetic peptide"
FQGSHVPYT

SEQ ID NO: 251 - protein, 458 aa, Artificial Sequence
  source: /note="Description of Artificial Sequence: Synthetic polypeptide"
EVQLLESGGGLVQPGGSLRLSCAASGFTFSHYMMAWVRQAPGKGLEWVSRIGPSGGPTHYADSVKGRFTISRDNSKNTLYLQMNSLRAEDTAVYYCAGYDSGYDYVAVAGPAEYFQHWGQGTLVTVSSASTKGPSVFPLAPSSKSTSGGTAALGCLVKDYFPEPVTVSWNSGALTSGVHTFPAVLQSSGLYSLSSVVTVPSSSLGTQTYICNVNHKPSNTKVDKKVEPKSCDKTHTCPPCPAPELLGGPSVFLFPPKPKDTLMISRTPEVTCVVVDVSHEDPEVKFNWYVDGVEVHNAKTKPREEQYNSTYRVVSVLTVLHQDWLNGKEYKCKVSNKALPAPIEKTISKAKGQPREPQVYTLPPSREEMTKNQVSLTCLVKGFYPSDIAVEWESNGQPENNYKTTPPVLDSDGSFFLYSKLTVDKSRWQQGNVFSCSVMHEALHNHYTQKSLSLSPGK

SEQ ID NO: 252 - protein, 128 aa, Artificial Sequence
  source: /note="Description of Artificial Sequence: Synthetic polypeptide"
EVQLLESGGGLVQPGGSLRLSCAASGFTFSHYMMAWVRQAPGKGLEWVSRIGPSGGPTHYADSVKGRFTISRDNSKNTLYLQMNSLRAEDTAVYYCAGYDSGYDYVAVAGPAEYFQHWGQGTLVTVSS

SEQ ID NO: 253 - protein, 8 aa, Artificial Sequence
  source: /note="Description of Artificial Sequence: Synthetic peptide"
GFTFSHYM

SEQ ID NO: 254 - protein, 8 aa, Artificial Sequence
  source: /note="Description of Artificial Sequence: Synthetic peptide"
IGPSGGPT

SEQ ID NO: 255 - protein, 21 aa, Artificial Sequence
  source: /note="Description of Artificial Sequence: Synthetic peptide"
AGYDSGYDYVAVAGPAEYFQH

SEQ ID NO: 256 - protein, 214 aa, Artificial Sequence
  source: /note="Description of Artificial Sequence: Synthetic polypeptide"
DIQMTQSPSSLSASVGDRVTITCRASQSISTWLAWYQQKPGKAPKLLIYKASNLHTGVPSRFSGSGSGTEFSLTISGLQPDDFATYYCQQYNSYSRTFGQGTKVEIKRTVAAPSVFIFPPSDEQLKSGTASVVCLLNNFYPREAKVQWKVDNALQSGNSQESVTEQDSKDSTYSLSSTLTLSKADYEKHKVYACEVTHQGLSSPVTKSFNRGEC

SEQ ID NO: 257 - protein, 107 aa, Artificial Sequence
  source: /note="Description of Artificial Sequence: Synthetic polypeptide"
DIQMTQSPSSLSASVGDRVTITCRASQSISTWLAWYQQKPGKAPKLLIYKASNLHTGVPSRFSGSGSGTEFSLTISGLQPDDFATYYCQQYNSYSRTFGQGTKVEIK

SEQ ID NO: 258 - protein, 6 aa, Artificial Sequence
  source: /note="Description of Artificial Sequence: Synthetic peptide"
QSISTW

SEQ ID NO: 259 - protein, 3 aa, Artificial Sequence
  source: /note="Description of Artificial Sequence: Synthetic peptide"
KAS

SEQ ID NO: 260 - protein, 9 aa, Artificial Sequence
  source: /note="Description of Artificial Sequence: Synthetic peptide"
QQYNSYSRT

SEQ ID NO: 261 - protein, 452 aa, Artificial Sequence
  source: /note="Description of Artificial Sequence: Synthetic polypeptide"
EVQLVESGGGLVQPGGSLRLSCAASGFTFSSYLMTWVRQAPGKGLEWVANIKQDGSEKYYVDSVKGRFTISRDNAKNSLNLQMNSLRAEDTAVYYCTRDGYSSGRHYGMDVWGQGTTVIVSSASTKGPSVFPLAPSSKSTSGGTAALGCLVKDYFPEPVTVSWNSGALTSGVHTFPAVLQSSGLYSLSSVVTVPSSSLGTQTYICNVNHKPSNTKVDKRVEPKSCDKTHTCPPCPAPELLGGPSVFLFPPKPKDTLMISRTPEVTCVVVDVSHEDPEVKFNWYVDGVEVHNAKTKPREEQYNSTYRVVSVLTVLHQDWLNGKEYKCKVSNKALPAPIEKTISKAKGQPREPQVYTLPPSREEMTKNQVSLTCLVKGFYPSDIAVEWESNGQPENNYKTTPPVLDSDGSFFLYSKLTVDKSRWQQGNVFSCSVMHEALHNHYTQKSLSLSPGK

SEQ ID NO: 262 - protein, 122 aa, Artificial Sequence
  source: /note="Description of Artificial Sequence: Synthetic polypeptide"
EVQLVESGGGLVQPGGSLRLSCAASGFTFSSYLMTWVRQAPGKGLEWVANIKQDGSEKYYVDSVKGRFTISRDNAKNSLNLQMNSLRAEDTAVYYCTRDGYSSGRHYGMDVWGQGTTVIVSS

SEQ ID NO: 263 - protein, 8 aa, Artificial Sequence
  source: /note="Description of Artificial Sequence: Synthetic peptide"
GFTFSSYL

SEQ ID NO: 264 - protein, 8 aa, Artificial Sequence
  source: /note="Description of Artificial Sequence: Synthetic peptide"
IKQDGSEK

SEQ ID NO: 265 - protein, 15 aa, Artificial Sequence
  source: /note="Description of Artificial Sequence: Synthetic peptide"
TRDGYSSGRHYGMDV

SEQ ID NO: 266 - protein, 214 aa, Artificial Sequence
  source: /note="Description of Artificial Sequence: Synthetic polypeptide"
EIVLTQSPATLSLSPGERATLSCRASQSVSRYLAWYQQKPGQAPRLLIYDASNRATGIPARFSGSGSGTDFTLTISSLEPEDFAVYYCQQRSNWPRTFGQGTKVEIKRTVAAPSVFIFPPSDEQLKSGTASVVCLLNNFYPREAKVQWKVDNALQSGNSQESVTEQDSKDSTYSLSSTLTLSKADYEKHKVYACEVTHQGLSSPVTKSFNRGEC

SEQ ID NO: 267 - protein, 107 aa, Artificial Sequence
  source: /note="Description of Artificial Sequence: Synthetic polypeptide"
EIVLTQSPATLSLSPGERATLSCRASQSVSRYLAWYQQKPGQAPRLLIYDASNRATGIPARFSGSGSGTDFTLTISSLEPEDFAVYYCQQRSNWPRTFGQGTKVEIK

SEQ ID NO: 268 - protein, 6 aa, Artificial Sequence
  source: /note="Description of Artificial Sequence: Synthetic peptide"
QSVSRY

SEQ ID NO: 269 - protein, 3 aa, Artificial Sequence
  source: /note="Description of Artificial Sequence: Synthetic peptide"
DAS

SEQ ID NO: 270 - protein, 9 aa, Artificial Sequence
  source: /note="Description of Artificial Sequence: Synthetic peptide"
QQRSNWPRT

SEQ ID NO: 271 - protein, 450 aa, Artificial Sequence
  source: /note="Description of Artificial Sequence: Synthetic polypeptide"
EVQLVESGPALVKPTQTLTLTCTVSGFSLTGYSVNWIRQPPGKALEWLGMIWGDGSTDYNSALKSRLTISKDTSKNQVVLTMTNMDPVDTATYYCARDYYFNYASWFAYWGQGTLVTVSSASTKGPSVFPLAPSSKSTSGGTAALGCLVKDYFPEPVTVSWNSGALTSGVHTFPAVLQSSGLYSLSSVVTVPSSSLGTQTYICNVNHKPSNTKVDKKVEPKSCDKTHTCPPCPAPELLGGPSVFLFPPKPKDTLMISRTPEVTCVVVDVSHEDPEVKFNWYVDGVEVHNAKTKPREEQYNSTYRVVSVLTVLHQDWLNGKEYKCKVSNKALPAPIEKTISKAKGQPREPQVYTLPPSREEMTKNQVSLTCLVKGFYPSDIAVEWESNGQPENNYKTTPPVLDSDGSFFLYSKLTVDKSRWQQGNVFSCSVMHEALHNHYTQKSLSLSPGK

SEQ ID NO: 272 - protein, 120 aa, Artificial Sequence
  source: /note="Description of Artificial Sequence: Synthetic polypeptide"
EVQLVESGPALVKPTQTLTLTCTVSGFSLTGYSVNWIRQPPGKALEWLGMIWGDGSTDYNSALKSRLTISKDTSKNQVVLTMTNMDPVDTATYYCARDYYFNYASWFAYWGQGTLVTVSS

SEQ ID NO: 273 - protein, 8 aa, Artificial Sequence
  source: /note="Description of Artificial Sequence: Synthetic peptide"
GFSLTGYS

SEQ ID NO: 274 - protein, 7 aa, Artificial Sequence
  source: /note="Description of Artificial Sequence: Synthetic peptide"
IWGDGST

SEQ ID NO: 275 - protein, 14 aa, Artificial Sequence
  source: /note="Description of Artificial Sequence: Synthetic peptide"
ARDYYFNYASWFAY

SEQ ID NO: 276 - protein, 214 aa, Artificial Sequence
  source: /note="Description of Artificial Sequence: Synthetic polypeptide"
DIQMTQSPSSLSASVGDRVTITCSASQGISNYLNWYQQKPGKTVKLLIYYTSNLHSGVPSRFSGSGSGTDYTLTISSLQPEDFATYYCQQYSELPWTFGQGTKVEIKRTVAAPSVFIFPPSDEQLKSGTASVVCLLNNFYPREAKVQWKVDNALQSGNSQESVTEQDSKDSTYSLSSTLTLSKADYEKHKVYACEVTHQGLSSPVTKSFNRGEC

SEQ ID NO: 277 - protein, 107 aa, Artificial Sequence
  source: /note="Description of Artificial Sequence: Synthetic polypeptide"
DIQMTQSPSSLSASVGDRVTITCSASQGISNYLNWYQQKPGKTVKLLIYYTSNLHSGVPSRFSGSGSGTDYTLTISSLQPEDFATYYCQQYSELPWTFGQGTKVEIK

SEQ ID NO: 278 - protein, 7 aa, Artificial Sequence
  source: /note="Description of Artificial Sequence: Synthetic peptide"
QGISNYL

SEQ ID NO: 279 - protein, 3 aa, Artificial Sequence
  source: /note="Description of Artificial Sequence: Synthetic peptide"
YTS

SEQ ID NO: 280 - protein, 9 aa, Artificial Sequence
  source: /note="Description of Artificial Sequence: Synthetic peptide"
QQYSELPWT

SEQ ID NO: 281 - protein, 449 aa, Artificial Sequence
  source: /note="Description of Artificial Sequence: Synthetic polypeptide"
EVQLVESGGGVVQPGRSLRLSCSASGFTFSGYGLSWVRQAPGKGLEWVAMISSGGSYTYYADSVKGRFAISRDNAKNTLFLQMDSLRPEDTGVYFCARHGDDPAWFAYWGQGTPVTVSSASTKGPSVFPLAPSSKSTSGGTAALGCLVKDYFPEPVTVSWNSGALTSGVHTFPAVLQSSGLYSLSSVVTVPSSSLGTQTYICNVNHKPSNTKVDKKVEPKSCDKTHTCPPCPAPELLGGPSVFLFPPKPKDTLMISRTPEVTCVVVDVSHEDPEVKFNWYVDGVEVHNAKTKPREEQYNSTYRVVSVLTVLHQDWLNGKEYKCKVSNKALPAPIEKTISKAKGQPREPQVYTLPPSRDELTKNQVSLTCLVKGFYPSDIAVEWESNGQPENNYKTTPPVLDSDGSFFLYSKLTVDKSRWQQGNVFSCSVMHEALHNHYTQKSLSLSPGK

SEQ ID NO: 282 - protein, 119 aa, Artificial Sequence
  source: /note="Description of Artificial Sequence: Synthetic polypeptide"
EVQLVESGGGVVQPGRSLRLSCSASGFTFSGYGLSWVRQAPGKGLEWVAMISSGGSYTYYADSVKGRFAISRDNAKNTLFLQMDSLRPEDTGVYFCARHGDDPAWFAYWGQGTPVTVSS

SEQ ID NO: 283 - protein, 8 aa, Artificial Sequence
  source: /note="Description of Artificial Sequence: Synthetic peptide"
GFTFSGYG

SEQ ID NO: 284 - protein, 8 aa, Artificial Sequence
  source: /note="Description of Artificial Sequence: Synthetic peptide"
ISSGGSYT

SEQ ID NO: 285 - protein, 12 aa, Artificial Sequence
  source: /note="Description of Artificial Sequence: Synthetic peptide"
ARHGDDPAWFAY

SEQ ID NO: 286 - protein, 217 aa, Artificial Sequence
  source: /note="Description of Artificial Sequence: Synthetic polypeptide"
DIQLTQSPSSLSASVGDRVTITCSVSSSISSNNLHWYQQKPGKAPKPWIYGTSNLASGVPSRFSGSGSGTDYTFTISSLQPEDIATYYCQQWSSYPYMYTFGQGTKVEIKRTVAAPSVFIFPPSDEQLKSGTASVVCLLNNFYPREAKVQWKVDNALQSGNSQESVTEQDSKDSTYSLSSTLTLSKADYEKHKVYACEVTHQGLSSPVTKSFNRGEC

SEQ ID NO: 287 - protein, 110 aa, Artificial Sequence
  source: /note="Description of Artificial Sequence: Synthetic polypeptide"
DIQLTQSPSSLSASVGDRVTITCSVSSSISSNNLHWYQQKPGKAPKPWIYGTSNLASGVPSRFSGSGSGTDYTFTISSLQPEDIATYYCQQWSSYPYMYTFGQGTKVEIK

SEQ ID NO: 288 - protein, 7 aa, Artificial Sequence
  source: /note="Description of Artificial Sequence: Synthetic peptide"
SSISSNN

SEQ ID NO: 289 - protein, 3 aa, Artificial Sequence
  source: /note="Description of Artificial Sequence: Synthetic peptide"
GTS

SEQ ID NO: 290 - protein, 11 aa, Artificial Sequence
  source: /note="Description of Artificial Sequence: Synthetic peptide"
QQWSSYPYMYT

SEQ ID NO: 291 - protein, 447 aa, Artificial Sequence
  source: /note="Description of Artificial Sequence: Synthetic polypeptide"
QVQLVQSGAEVVKPGASVKISCKASGYTFTGYFMNWVKQSPGQSLEWIGRIHPYDGDTFYNQKFQGKATLTVDKSSNTAHMELLSLTSEDFAVYYCTRYDGSRAMDYWGQGTTVTVSSASTKGPSVFPLAPSSKSTSGGTAALGCLVKDYFPEPVTVSWNSGALTSGVHTFPAVLQSSGLYSLSSVVTVPSSSLGTQTYICNVNHKPSNTKVDKKVEPKSCDKTHTCPPCPAPELLGGPSVFLFPPKPKDTLMISRTPEVTCVVVDVSHEDPEVKFNWYVDGVEVHNAKTKPREEQYNSTYRVVSVLTVLHQDWLNGKEYKCKVSNKALPAPIEKTISKAKGQPREPQVYTLPPSRDELTKNQVSLTCLVKGFYPSDIAVEWESNGQPENNYKTTPPVLDSDGSFFLYSKLTVDKSRWQQGNVFSCSVMHEALHNHYTQKSLSLSPG

SEQ ID NO: 292 - protein, 118 aa, Artificial Sequence
  source: /note="Description of Artificial Sequence: Synthetic polypeptide"
QVQLVQSGAEVVKPGASVKISCKASGYTFTGYFMNWVKQSPGQSLEWIGRIHPYDGDTFYNQKFQGKATLTVDKSSNTAHMELLSLTSEDFAVYYCTRYDGSRAMDYWGQGTTVTVSS

SEQ ID NO: 293 - protein, 8 aa, Artificial Sequence
  source: /note="Description of Artificial Sequence: Synthetic peptide"
GYTFTGYF

SEQ ID NO: 294 - protein, 8 aa, Artificial Sequence
  source: /note="Description of Artificial Sequence: Synthetic peptide"
IHPYDGDT

SEQ ID NO: 295 - protein, 11 aa, Artificial Sequence
  source: /note="Description of Artificial Sequence: Synthetic peptide"
TRYDGSRAMDY

SEQ ID NO: 296 - protein, 218 aa, Artificial Sequence
  source: /note="Description of Artificial Sequence: Synthetic polypeptide"
DIVLTQSPLSLAVSLGQPAIISCKASQSVSFAGTSLMHWYHQKPGQQPRLLIYRASNLEAGVPDRFSGSGSKTDFTLTISPVEAEDAATYYCQQSREYPYTFGGGTKLEIKRTVAAPSVFIFPPSDEQLKSGTASVVCLLNNFYPREAKVQWKVDNALQSGNSQESVTEQDSKDSTYSLSSTLTLSKADYEKHKVYACEVTHQGLSSPVTKSFNRGEC

SEQ ID NO: 297 - protein, 111 aa, Artificial Sequence
  source: /note="Description of Artificial Sequence: Synthetic polypeptide"
DIVLTQSPLSLAVSLGQPAIISCKASQSVSFAGTSLMHWYHQKPGQQPRLLIYRASNLEAGVPDRFSGSGSKTDFTLTISPVEAEDAATYYCQQSREYPYTFGGGTKLEIK

SEQ ID NO: 298 - protein, 10 aa, Artificial Sequence
  source: /note="Description of Artificial Sequence: Synthetic peptide"
QSVSFAGTSL

SEQ ID NO: 299 - protein, 3 aa, Artificial Sequence
  source: /note="Description of Artificial Sequence: Synthetic peptide"
RAS

SEQ ID NO: 300 - protein, 9 aa, Artificial Sequence
  source: /note="Description of Artificial Sequence: Synthetic peptide"
QQSREYPYT

SEQ ID NO: 301 - protein, 445 aa, Artificial Sequence
  source: /note="Description of Artificial Sequence: Synthetic polypeptide"
EVQLQQSGPELKKPGTSVRISCKTSGYTFTEYTIHWVKQSHGKSLEWIGNINPNNGGTTYNQKFEDKATLTVDKSSSTAYMELRSLTSEDSAVYYCAAGWNFDYWGQGTTLTVSSASTKGPSVFPLAPSSKSTSGGTAALGCLVKDYFPEPVTVSWNSGALTSGVHTFPAVLQSSGLYSLSSVVTVPSSSLGTQTYICNVNHKPSNTKVDKKVEPKSCDKTHTCPPCPAPELLGGPSVFLFPPKPKDTLMISRTPEVTCVVVDVSHEDPEVKFNWYVDGVEVHNAKTKPREEQYNSTYRVVSVLTVLHQDWLNGKEYKCKVSNKALPAPIEKTISKAKGQPREPQVYTLPPSREEMTKNQVSLTCLVKGFYPSDIAVEWESNGQPENNYKTTPPVLDSDGSFFLYSKLTVDKSRWQQGNVFSCSVMHEALHNHYTQKSLSLSPGK

SEQ ID NO: 302 - protein, 115 aa, Artificial Sequence
  source: /note="Description of Artificial Sequence: Synthetic polypeptide"
EVQLQQSGPELKKPGTSVRISCKTSGYTFTEYTIHWVKQSHGKSLEWIGNINPNNGGTTYNQKFEDKATLTVDKSSSTAYMELRSLTSEDSAVYYCAAGWNFDYWGQGTTLTVSS

SEQ ID NO: 303 - protein, 8 aa, Artificial Sequence
  source: /note="Description of Artificial Sequence: Synthetic peptide"
GYTFTEYT

SEQ ID NO: 304 - protein, 8 aa, Artificial Sequence
  source: /note="Description of Artificial Sequence: Synthetic peptide"
INPNNGGT

SEQ ID NO: 305 - protein, 8 aa, Artificial Sequence
  source: /note="Description of Artificial Sequence: Synthetic peptide"
AAGWNFDY

SEQ ID NO: 306 - protein, 214 aa, Artificial Sequence
  source: /note="Description of Artificial Sequence: Synthetic polypeptide"
DIVMTQSHKFMSTSVGDRVSIICKASQDVGTAVDWYQQKPGQSPKLLIYWASTRHTGVPDRFTGSGSGTDFTLTITNVQSEDLADYFCQQYNSYPLTFGAGTMLDLKRTVAAPSVFIFPPSDEQLKSGTASVVCLLNNFYPREAKVQWKVDNALQSGNSQESVTEQDSKDSTYSLSSTLTLSKADYEKHKVYACEVTHQGLSSPVTKSFNRGEC

SEQ ID NO: 307 - protein, 107 aa, Artificial Sequence
  source: /note="Description of Artificial Sequence: Synthetic polypeptide"
DIVMTQSHKFMSTSVGDRVSIICKASQDVGTAVDWYQQKPGQSPKLLIYWASTRHTGVPDRFTGSGSGTDFTLTITNVQSEDLADYFCQQYNSYPLTFGAGTMLDLK

SEQ ID NO: 308 - protein, 6 aa, Artificial Sequence
  source: /note="Description of Artificial Sequence: Synthetic peptide"
QDVGTA

SEQ ID NO: 309 - protein, 3 aa, Artificial Sequence
  source: /note="Description of Artificial Sequence: Synthetic peptide"
WAS

SEQ ID NO: 310 - protein, 9 aa, Artificial Sequence
  source: /note="Description of Artificial Sequence: Synthetic peptide"
QQYNSYPLT

SEQ ID NO: 311 - protein, 445 aa, Artificial Sequence
  source: /note="Description of Artificial Sequence: Synthetic polypeptide"
EVQLQQSGPELVKPGTSVRISCKTSGYTFTEYTIHWVKQSHGKSLEWIGNINPNNGGTTYNQKFEDKATLTVDKSSSTAYMELRSLTSEDSAVYYCAAGWNFDYWGQGTTLTVSSASTKGPSVFPLAPSSKSTSGGTAALGCLVKDYFPEPVTVSWNSGALTSGVHTFPAVLQSSGLYSLSSVVTVPSSSLGTQTYICNVNHKPSNTKVDKKVEPKSCDKTHTCPPCPAPELLGGPSVFLFPPKPKDTLMISRTPEVTCVVVDVSHEDPEVKFNWYVDGVEVHNAKTKPREEQYNSTYRVVSVLTVLHQDWLNGKEYKCKVSNKALPAPIEKTISKAKGQPREPQVYTLPPSREEMTKNQVSLTCLVKGFYPSDIAVEWESNGQPENNYKTTPPVLDSDGSFFLYSKLTVDKSRWQQGNVFSCSVMHEALHNHYTQKSLSLSPGK

SEQ ID NO: 312 - protein, 115 aa, Artificial Sequence
  source: /note="Description of Artificial Sequence: Synthetic polypeptide"
EVQLQQSGPELVKPGTSVRISCKTSGYTFTEYTIHWVKQSHGKSLEWIGNINPNNGGTTYNQKFEDKATLTVDKSSSTAYMELRSLTSEDSAVYYCAAGWNFDYWGQGTTLTVSS

SEQ ID NO: 313 - protein, 8 aa, Artificial Sequence
  source: /note="Description of Artificial Sequence: Synthetic peptide"
GYTFTEYT

SEQ ID NO: 314 - protein, 8 aa, Artificial Sequence
  source: /note="Description of Artificial Sequence: Synthetic peptide"
INPNNGGT

SEQ ID NO: 315 - protein, 8 aa, Artificial Sequence
  source: /note="Description of Artificial Sequence: Synthetic peptide"
AAGWNFDY

SEQ ID NO: 316 - protein, 214 aa, Artificial Sequence; identical to SEQ ID NO: 106
  source: /note="Description of Artificial Sequence: Synthetic polypeptide"

SEQ ID NO: 317 - protein, 107 aa, Artificial Sequence; identical to SEQ ID NO: 107
  source: /note="Description of Artificial Sequence: Synthetic polypeptide"

SEQ ID NO: 318 - protein, 6 aa, Artificial Sequence
  source: /note="Description of Artificial Sequence: Synthetic peptide"
ENVVTY

SEQ ID NO: 319 - protein, 3 aa, Artificial Sequence
  source: /note="Description of Artificial Sequence: Synthetic peptide"
GAS

SEQ ID NO: 320 - protein, 9 aa, Artificial Sequence
  source: /note="Description of Artificial Sequence: Synthetic peptide"
GQGYSYPYT

SEQ ID NO: 321 - protein, 447 aa, Artificial Sequence
  source: /note="Description of Artificial Sequence: Synthetic polypeptide"
QVQLVQSGAEVKKPGASVKVSCKASGYTFTNYGMNWVRQAPGQGLEWMGWINTYTGEPTYADDFKGRVTMTTDTSTSTAYMELRSLRSDDTAVYYCARIGDSSPSDYWGQGTLVTVSSASTKGPSVFPLAPSSKSTSGGTAALGCLVKDYFPEPVTVSWNSGALTSGVHTFPAVLQSSGLYSLSSVVTVPSSSLGTQTYICNVNHKPSNTKVDKKVEPKSCDKTHTCPPCPAPELLGGPSVFLFPPKPKDTLMISRTPEVTCVVVDVSHEDPEVKFNWYVDGVEVHNAKTKPREEQYNSTYRVVSVLTVLHQDWLNGKEYKCKVSNKALPAPIEKTISKAKGQPREPQVYTLPPSRDELTKNQVSLTCLVKGFYPSDIAVEWESNGQPENNYKTTPPVLDSDGSFFLYSKLTVDKSRWQQGNVFSCSVMHEALHNHYTQKSLSLSPG

SEQ ID NO: 322 - protein, 118 aa, Artificial Sequence
  source: /note="Description of Artificial Sequence: Synthetic polypeptide"
QVQLVQSGAEVKKPGASVKVSCKASGYTFTNYGMNWVRQAPGQGLEWMGWINTYTGEPTYADDFKGRVTMTTDTSTSTAYMELRSLRSDDTAVYYCARIGDSSPSDYWGQGTLVTVSS

SEQ ID NO: 323 - protein, 8 aa, Artificial Sequence
  source: /note="Description of Artificial Sequence: Synthetic peptide"
GYTFTNYG

SEQ ID NO: 324 - protein, 8 aa, Artificial Sequence
  source: /note="Description of Artificial Sequence: Synthetic peptide"
INTYTGEP

SEQ ID NO: 325 - protein, 11 aa, Artificial Sequence
  source: /note="Description of Artificial Sequence: Synthetic peptide"
ARIGDSSPSDY

SEQ ID NO: 326 - protein, 214 aa, Artificial Sequence
  source: /note="Description of Artificial Sequence: Synthetic polypeptide"
EIVMTQSPATLSVSPGERATLSCKASQSVSNDVVWYQQKPGQAPRLLIYYASNRYTGIPARFSGSGSGTEFTLTISSLQSEDFAVYYCQQDYTSPWTFGQGTKLEIKRTVAAPSVFIFPPSDEQLKSGTASVVCLLNNFYPREAKVQWKVDNALQSGNSQESVTEQDSKDSTYSLSSTLTLSKADYEKHKVYACEVTHQGLSSPVTKSFNRGEC

SEQ ID NO: 327 - protein, 107 aa, Artificial Sequence
  source: /note="Description of Artificial Sequence: Synthetic polypeptide"
EIVMTQSPATLSVSPGERATLSCKASQSVSNDVVWYQQKPGQAPRLLIYYASNRYTGIPARFSGSGSGTEFTLTISSLQSEDFAVYYCQQDYTSPWTFGQGTKLEIK

SEQ ID NO: 328 - protein, 6 aa, Artificial Sequence
  source: /note="Description of Artificial Sequence: Synthetic peptide"
QSVSND

SEQ ID NO: 329 - protein, 3 aa, Artificial Sequence
  source: /note="Description of Artificial Sequence: Synthetic peptide"
YAS

SEQ ID NO: 330 - protein, 9 aa, Artificial Sequence
  source: /note="Description of Artificial Sequence: Synthetic peptide"
QQDYTSPWT

SEQ ID NO: 331 - protein, 449 aa, Artificial Sequence
  source: /note="Description of Artificial Sequence: Synthetic polypeptide"
QVQLVQSGPEVKKPGASVKVSCKASGYTFTDYAVHWVRQAPGKRLEWIGVISTYNDYTYNNQDFKGRVTMTRDTSASTAYMELSRLRSEDTAVYYCARGNSYFYALDYWGQGTSVTVSSASTKGPSVFPLAPSSKSTSGGTAALGCLVKDYFPEPVTVSWNSGALTSGVHTFPAVLQSSGLYSLSSVVTVPSSSLGTQTYICNVNHKPSNTKVDKKVEPKSCDKTHTCPPCPAPELLGGPSVFLFPPKPKDTLMISRTPEVTCVVVDVSHEDPEVKFNWYVDGVEVHNAKTKPREEQYNSTYRVVSVLTVLHQDWLNGKEYKCKVSNKALPAPIEKTISKAKGQPREPQVYTLPPSREEMTKNQVSLTCLVKGFYPSDIAVEWESNGQPENNYKTTPPVLDSDGSFFLYSKLTVDKSRWQQGNVFSCSVMHEALHNHYTQKSLSLSPGK

SEQ ID NO: 332 - protein, 119 aa, Artificial Sequence
  source: /note="Description of Artificial Sequence: Synthetic polypeptide"
QVQLVQSGPEVKKPGASVKVSCKASGYTFTDYAVHWVRQAPGKRLEWIGVISTYNDYTYNNQDFKGRVTMTRDTSASTAYMELSRLRSEDTAVYYCARGNSYFYALDYWGQGTSVTVSS

SEQ ID NO: 333 - protein, 8 aa, Artificial Sequence
  source: /note="Description of Artificial Sequence: Synthetic peptide"
GYTFTDYA

SEQ ID NO: 334 - protein, 8 aa, Artificial Sequence
  source: /note="Description of Artificial Sequence: Synthetic peptide"
ISTYNDYT

SEQ ID NO: 335 - protein, 12 aa, Artificial Sequence
  source: /note="Description of Artificial Sequence: Synthetic peptide"
ARGNSYFYALDY

SEQ ID NO: 336 - protein, 218 aa, Artificial Sequence
  source: /note="Description of Artificial Sequence: Synthetic polypeptide"
EIVLTQSPATLSLSPGERATLSCRASESVDSYGKSFMHWYQQKPGQAPRLLIYRASNLESGIPARFSGSGSGTDFTLTISSLEPEDFAVYYCQQSNEDPWTFGGGTKLEIKRTVAAPSVFIFPPSDEQLKSGTASVVCLLNNFYPREAKVQWKVDNALQSGNSQESVTEQDSKDSTYSLSSTLTLSKADYEKHKVYACEVTHQGLSSPVTKSFNRGEC

SEQ ID NO: 337 - protein, 111 aa, Artificial Sequence
  source: /note="Description of Artificial Sequence: Synthetic polypeptide"
EIVLTQSPATLSLSPGERATLSCRASESVDSYGKSFMHWYQQKPGQAPRLLIYRASNLESGIPARFSGSGSGTDFTLTISSLEPEDFAVYYCQQSNEDPWTFGGGTKLEIK

SEQ ID NO: 338 - protein, 10 aa, Artificial Sequence
  source: /note="Description of Artificial Sequence: Synthetic peptide"
ESVDSYGKSF

SEQ ID NO: 339 - protein, 3 aa, Artificial Sequence
  source: /note="Description of Artificial Sequence: Synthetic peptide"
RAS

SEQ ID NO: 340 - protein, 9 aa, Artificial Sequence
  source: /note="Description of Artificial Sequence: Synthetic peptide"
QQSNEDPWT

SEQ ID NO: 341 - protein, 445 aa, Artificial Sequence
  source: /note="Description of Artificial Sequence: Synthetic polypeptide"
QVQLVESGGGVVQPGRSLRLSCAASGFTFSSYAFHWVRQAPGKGLEWVAVISYDGSIKYYADSVKGRFTISRDNSKNTLYLQMNSLRAEDTAVYYCARTYYFDYWGQGTLVTVSSASTKGPSVFPLAPSSKSTSGGTAALGCLVKDYFPEPVTVSWNSGALTSGVHTFPAVLQSSGLYSLSSVVTVPSSSLGTQTYICNVNHKPSNTKVDKKVEPKSCDKTHTCPPCPAPELLGGPSVFLFPPKPKDTLMISRTPEVTCVVVDVSHEDPEVKFNWYVDGVEVHNAKTKPREEQYNSTYRVVSVLTVLHQDWLNGKEYKCKVSNKALPAPIEKTISKAKGQPREPQVYTLPPSREEMTKNQVSLTCLVKGFYPSDIAVEWESNGQPENNYKTTPPVLDSDGSFFLYSKLTVDKSRWQQGNVFSCSVMHEALHNHYTQKSLSLSPGK

SEQ ID NO: 342 - protein, 115 aa, Artificial Sequence
  source: /note="Description of Artificial Sequence: Synthetic polypeptide"
QVQLVESGGGVVQPGRSLRLSCAASGFTFSSYAFHWVRQAPGKGLEWVAVISYDGSIKYYADSVKGRFTISRDNSKNTLYLQMNSLRAEDTAVYYCARTYYFDYWGQGTLVTVSS

SEQ ID NO: 343 - protein, 8 aa, Artificial Sequence
  source: /note="Description of Artificial Sequence: Synthetic peptide"
GFTFSSYA

SEQ ID NO: 344 - protein, 8 aa, Artificial Sequence
  source: /note="Description of Artificial Sequence: Synthetic peptide"
ISYDGSIK

SEQ ID NO: 345 - protein, 8 aa, Artificial Sequence
  source: /note="Description of Artificial Sequence: Synthetic peptide"
ARTYYFDY

SEQ ID NO: 346 - protein, 214 aa, Artificial Sequence
  source: /note="Description of Artificial Sequence: Synthetic polypeptide"
EIVLTQSPDFQSVTPKEKVTITCRASQSIGSSLHWYQQKPDQSPKLLIKYASQSFSGVPSRFSGSGSGTDFTLTINSLEAEDAAAYYCHQSSSLPITFGQGTRLEIKRTVAAPSVFIFPPSDEQLKSGTASVVCLLNNFYPREAKVQWKVDNALQSGNSQESVTEQDSKDSTYSLSSTLTLSKADYEKHKVYACEVTHQGLSSPVTKSFNRGEC

SEQ ID NO: 347 - protein, 107 aa, Artificial Sequence
  source: /note="Description of Artificial Sequence: Synthetic polypeptide"
EIVLTQSPDFQSVTPKEKVTITCRASQSIGSSLHWYQQKPDQSPKLLIKYASQSFSGVPSRFSGSGSGTDFTLTINSLEAEDAAAYYCHQSSSLPITFGQGTRLEIK

SEQ ID NO: 348 - protein, 6 aa, Artificial Sequence
  source: /note="Description of Artificial Sequence: Synthetic peptide"
QSIGSS

SEQ ID NO: 349 - protein, 3 aa, Artificial Sequence
  source: /note="Description of Artificial Sequence: Synthetic peptide"
YAS

SEQ ID NO: 350 - protein, 9 aa, Artificial Sequence
  source: /note="Description of Artificial Sequence: Synthetic peptide"
HQSSSLPIT

SEQ ID NO: 351 - protein, 450 aa, Artificial Sequence
  source: /note="Description of Artificial Sequence: Synthetic polypeptide"
QVQLVQSGAEVKKPGASVKVSCKASGLTIEDYYMHWVRQAPGQGLEWMGWIDPENGDTEYGPKFQGRVTMTRDTSINTAYMELSRLRSDDTAVYYCAVHNAHYGTWFAYWGQGTLVTVSSASTKGPSVFPLAPSSKSTSGGTAALGCLVKDYFPEPVTVSWNSGALTSGVHTFPAVLQSSGLYSLSSVVTVPSSSLGTQTYICNVNHKPSNTKVDKKVEPKSCDKTHTCPPCPAPELLGGPSVFLFPPKPKDTLMISRTPEVTCVVVDVSHEDPEVKFNWYVDGVEVHNAKTKPREEQYNSTYRVVSVLTVLHQDWLNGKEYKCKVSNKALPAPIEKTISKAKGQPREPQVYTLPPSREEMTKNQVSLTCLVKGFYPSDIAVEWESNGQPENNYKTTPPVLDSDGSFFLYSKLTVDKSRWQQGNVFSCSVMHEALHNHYTQKSLSLSPGK

SEQ ID NO: 352 - protein, 120 aa, Artificial Sequence
  source: /note="Description of Artificial Sequence: Synthetic polypeptide"
QVQLVQSGAEVKKPGASVKVSCKASGLTIEDYYMHWVRQAPGQGLEWMGWIDPENGDTEYGPKFQGRVTMTRDTSINTAYMELSRLRSDDTAVYYCAVHNAHYGTWFAYWGQGTLVTVSS

SEQ ID NO: 353 - protein, 8 aa, Artificial Sequence
  source: /note="Description of Artificial Sequence: Synthetic peptide"
GLTIEDYY

SEQ ID NO: 354 - protein, 8 aa, Artificial Sequence
  source: /note="Description of Artificial Sequence: Synthetic peptide"
IDPENGDT

SEQ ID NO: 355 - protein, 13 aa, Artificial Sequence
  source: /note="Description of Artificial Sequence: Synthetic peptide"
AVHNAHYGTWFAY

SEQ ID NO: 356 - protein, 219 aa, Artificial Sequence
  source: /note="Description of Artificial Sequence: Synthetic polypeptide"
DVVMTQSPLSLPVTLGQPASISCRSSQSLLHSSGNTYLEYFQQRPGQSPRPLIYKISTRFSGVPDRFSGSGSGTDFTLKISRVEAEDVGVYYCFQGSHVPYTFGGGTKVEIKRTVAAPSVFIFPPSDEQLKSGTASVVCLLNNFYPREAKVQWKVDNALQSGNSQESVTEQDSKDSTYSLSSTLTLSKADYEKHKVYACEVTHQGLSSPVTKSFNRGEC

SEQ ID NO: 357 - protein, 112 aa, Artificial Sequence
  source: /note="Description of Artificial Sequence: Synthetic polypeptide"
DVVMTQSPLSLPVTLGQPASISCRSSQSLLHSSGNTYLEYFQQRPGQSPRPLIYKISTRFSGVPDRFSGSGSGTDFTLKISRVEAEDVGVYYCFQGSHVPYTFGGGTKVEIK

SEQ ID NO: 358 - protein, 11 aa, Artificial Sequence
  source: /note="Description of Artificial Sequence: Synthetic peptide"
QSLLHSSGNTY

SEQ ID NO: 359 - protein, 3 aa, Artificial Sequence
  source: /note="Description of Artificial Sequence: Synthetic peptide"
KIS

SEQ ID NO: 360 - protein, 9 aa, Artificial Sequence
  source: /note="Description of Artificial Sequence: Synthetic peptide"
FQGSHVPYT

SEQ ID NO: 361 - protein, 446 aa, Artificial Sequence
  source: /note="Description of Artificial Sequence: Synthetic polypeptide"
QVQLQESGPGLVKPSQTLSLTCTVSGYAFTAYNIHWVRQAPGQGLEWMGSFDPYDGGSSYNQKFKDRLTISKDTSKNQVVLTMTNMDPVDTATYYCARGWYYFDYWGHGTLVTVSSASTKGPSVFPLAPSSKSTSGGTAALGCLVKDYFPEPVTVSWNSGALTSGVHTFPAVLQSSGLYSLSSVVTVPSSSLGTQTYICNVNHKPSNTKVDKKVEPKSCDKTHTCPPCPAPELLGGPSVFLFPPKPKDTLMISRTPEVTCVVVDVSHEDPEVKFNWYVDGVEVHNAKTKPREEQYNSTYRVVSVLTVLHQDWLNGKEYKCKVSNKALPAPIEKTISKAKGQPREPQVYTLPPSREEMTKNQVSLTCLVKGFYPSDIAVEWESNGQPENNYKTTPPVLDSDGSFFLYSKLTVDKSRWQQGNVFSCSVMHEALHNHYTQKSLSLSPGK

SEQ ID NO: 362 - protein, 116 aa, Artificial Sequence
  source: /note="Description of Artificial Sequence: Synthetic polypeptide"
QVQLQESGPGLVKPSQTLSLTCTVSGYAFTAYNIHWVRQAPGQGLEWMGSFDPYDGGSSYNQKFKDRLTISKDTSKNQVVLTMTNMDPVDTATYYCARGWYYFDYWGHGTLVTVSS

SEQ ID NO: 363 - protein, 8 aa, Artificial Sequence
  source: /note="Description of Artificial Sequence: Synthetic peptide"
GYAFTAYN

SEQ ID NO: 364 - protein, 8 aa, Artificial Sequence
  source: /note="Description of Artificial Sequence: Synthetic peptide"
FDPYDGGS

SEQ ID NO: 365 - protein, 9 aa, Artificial Sequence
  source: /note="Description of Artificial Sequence: Synthetic peptide"
ARGWYYFDY

SEQ ID NO: 366 - protein, 214 aa, Artificial Sequence
  source: /note="Description of Artificial Sequence: Synthetic polypeptide"
DIVMTQTPLSLPVTPGEPASISCRASKSISKYLAWYQQKPGQAPRLLIYSGSTLQSGIPPRFSGSGYGTDFTLTINNIESEDAAYYFCQQHDESPYTFGEGTKVEIKRTVAAPSVFIFPPSDEQLKSGTASVVCLLNNFYPREAKVQWKVDNALQSGNSQESVTEQDSKDSTYSLSSTLTLSKADYEKHKVYACEVTHQGLSSPVTKSFNRGEC

SEQ ID NO: 367 - protein, 107 aa, Artificial Sequence
  source: /note="Description of Artificial Sequence: Synthetic polypeptide"
DIVMTQTPLSLPVTPGEPASISCRASKSISKYLAWYQQKPGQAPRLLIYSGSTLQSGIPPRFSGSGYGTDFTLTINNIESEDAAYYFCQQHDESPYTFGEGTKVEIK

SEQ ID NO: 368 - protein, 6 aa, Artificial Sequence
  source: /note="Description of Artificial Sequence: Synthetic peptide"
KSISKY

SEQ ID NO: 369 - protein, 3 aa, Artificial Sequence
  source: /note="Description of Artificial Sequence: Synthetic peptide"
SGS

SEQ ID NO: 370 - protein, 9 aa, Artificial Sequence
  source: /note="Description of Artificial Sequence: Synthetic peptide"
QQHDESPYT

SEQ ID NO: 371 - protein, 450 aa, Artificial Sequence
  source: /note="Description of Artificial Sequence: Synthetic polypeptide"
QVQLVESGGGVVQPGRSLRLSCTASGFRFRSHGMHWVRQAPGKGLEWVAVISYDGNNKLYADSVKGRITISRDNSKNTLFLQMNNVRAEDTAVYYCASPYTSDWQYFQYWGQGTLVIVSSASTKGPSVFPLAPSSKSTSGGTAALGCLVKDYFPEPVTVSWNSGALTSGVHTFPAVLQSSGLYSLSSVVTVPSSSLGTQTYICNVNHKPSNTKVDKKVEPKSCDKTHTCPPCPAPELLGGPSVFLFPPKPKDTLMISRTPEVTCVVVDVSHEDPEVKFNWYVDGVEVHNAKTKPREEQYNSTYRVVSVLTVLHQDWLNGKEYKCKVSNKALPAPIEKTISKAKGQPREPQVYTLPPSREEMTKNQVSLTCLVKGFYPSDIAVEWESNGQPENNYKTTPPVLDSDGSFFLYSKLTVDKSRWQQGNVFSCSVMHEALHNHYTQKSLSLSPGK

SEQ ID NO: 372 - protein, 120 aa, Artificial Sequence
  source: /note="Description of Artificial Sequence: Synthetic polypeptide"
QVQLVESGGGVVQPGRSLRLSCTASGFRFRSHGMHWVRQAPGKGLEWVAVISYDGNNKLYADSVKGRITISRDNSKNTLFLQMNNVRAEDTAVYYCASPYTSDWQYFQYWGQGTLVIVSS

SEQ ID NO: 373 - protein, 8 aa, Artificial Sequence
  source: /note="Description of Artificial Sequence: Synthetic peptide"
GFRFRSHG

SEQ ID NO: 374 - protein, 7 aa, Artificial Sequence
  source: /note="Description of Artificial Sequence: Synthetic peptide"
SYDGNNK

SEQ ID NO: 375 - protein, 13 aa, Artificial Sequence
  source: /note="Description of Artificial Sequence: Synthetic peptide"
ASPYTSDWQYFQY

SEQ ID NO: 376 - protein, 214 aa, Artificial Sequence
  source: /note="Description of Artificial Sequence: Synthetic polypeptide"
EIVMTQSPATLSVSPGERATFSCRASQNISTTLAWYQQKPGQAPRLLIYDTSTRATGIPARFSGSGSGTEFTLTISSLQSEDLAVYYCQQSNSWPLTFGGGTKVEIKRTVAAPSVFIFPPSDEQLKSGTASVVCLLNNFYPREAKVQWKVDNALQSGNSQESVTEQDSKDSTYSLSSTLTLSKADYEKHKVYACEVTHQGLSSPVTKSFNRGEC

SEQ ID NO: 377 - protein, 107 aa, Artificial Sequence
  source: /note="Description of Artificial Sequence: Synthetic polypeptide"
EIVMTQSPATLSVSPGERATFSCRASQNISTTLAWYQQKPGQAPRLLIYDTSTRATGIPARFSGSGSGTEFTLTISSLQSEDLAVYYCQQSNSWPLTFGGGTKVEIK

SEQ ID NO: 378 - protein, 6 aa, Artificial Sequence
  source: /note="Description of Artificial Sequence: Synthetic peptide"
QNISTT

SEQ ID NO: 379 - protein, 3 aa, Artificial Sequence
  source: /note="Description of Artificial Sequence: Synthetic peptide"
DTS

SEQ ID NO: 380 - protein, 9 aa, Artificial Sequence
  source: /note="Description of Artificial Sequence: Synthetic peptide"
QQSNSWPLT

SEQ ID NO: 381 - protein, 448 aa, Artificial Sequence
  source: /note="Description of Artificial Sequence: Synthetic polypeptide"
QVQLVQSGGGVVRPGGSLRLSCAASGFSFIDYGMSWVRQVPGKGLEWVAGMNWSGDKKGHAESVKGRFIISRDNAKNTLYLEMSSLRVEDTALYFCARGEYSNRFDPRGRGTLVTVSSASTKGPSVFPLAPSSKSTSGGTAALGCLVKDYFPEPVTVSWNSGALTSGVHTFPAVLQSSGLYSLSSVVTVPSSSLGTQTYICNVNHKPSNTKVDKKVEPKSCDKTHTCPPCPAPELLGGPSVFLFPPKPKDTLMISRTPEVTCVVVDVSHEDPEVKFNWYVDGVEVHNAKTKPREEQYNSTYRVVSVLTVLHQDWLNGKEYKCKVSNKALPAPIEKTISKAKGQPREPQVYTLPPSREEMTKNQVSLTCLVKGFYPSDIAVEWESNGQPENNYKTTPPVLDSDGSFFLYSKLTVDKSRWQQGNVFSCSVMHEALHNHYTQKSLSLSPGK

SEQ ID NO: 382 - protein, 118 aa, Artificial Sequence
  source: /note="Description of Artificial Sequence: Synthetic polypeptide"
QVQLVQSGGGVVRPGGSLRLSCAASGFSFIDYGMSWVRQVPGKGLEWVAGMNWSGDKKGHAESVKGRFIISRDNAKNTLYLEMSSLRVEDTALYFCARGEYSNRFDPRGRGTLVTVSS

SEQ ID NO: 383 - protein, 8 aa, Artificial Sequence
  source: /note="Description of Artificial Sequence: Synthetic peptide"
GFSFIDYG

SEQ ID NO: 384 - protein, 8 aa, Artificial Sequence
  source: /note="Description of Artificial Sequence: Synthetic peptide"
MNWSGDKK

SEQ ID NO: 385 - protein, 11 aa, Artificial Sequence
  source: /note="Description of Artificial Sequence: Synthetic peptide"
ARGEYSNRFDP

SEQ ID NO: 386 - protein, 219 aa, Artificial Sequence
  source: /note="Description of Artificial Sequence: Synthetic polypeptide"
DIVMTQTPLSLPVTLGQPASLSCRSSQSLVFTDGNTYLNWFQQRPGQSPRRLIYKVSSRDPGVPDRFSGTGSGTDFTLEISRVEAEDIGVYYCMQGTHWPPIFGQGTKVEIKRTVAAPSVFIFPPSDEQLKSGTASVVCLLNNFYPREAKVQWKVDNALQSGNSQESVTEQDSKDSTYSLSSTLTLSKADYEKHKVYACEVTHQGLSSPVTKSFNRGEC

SEQ ID NO: 387 - protein, 112 aa, Artificial Sequence
  source: /note="Description of Artificial Sequence: Synthetic polypeptide"
DIVMTQTPLSLPVTLGQPASLSCRSSQSLVFTDGNTYLNWFQQRPGQSPRRLIYKVSSRDPGVPDRFSGTGSGTDFTLEISRVEAEDIGVYYCMQGTHWPPIFGQGTKVEIK

SEQ ID NO: 388 - protein, 11 aa, Artificial Sequence
  source: /note="Description of Artificial Sequence: Synthetic peptide"
QSLVFTDGNTY

SEQ ID NO: 389 - protein, 3 aa, Artificial Sequence
  source: /note="Description of Artificial Sequence: Synthetic peptide"
KVS

SEQ ID NO: 390 - protein, 9 aa, Artificial Sequence
  source: /note="Description of Artificial Sequence: Synthetic peptide"
MQGTHWPPI

SEQ ID NO: 391 - protein, 450 aa, Artificial Sequence
  source: /note="Description of Artificial Sequence: Synthetic polypeptide"
EVQLVESGGGLVQPGGSLRLSCAASGFNIKDTYIHWVRQAPGKGLEWVARIYPTNGYTRYADSVKGRFTISADTSKNTAYLQMNSLRAEDTAVYYCSRWGGDGFYAMDYWGQGTLVTVSSASTKGPSVFPLAPSSKSTSGGTAALGCLVKDYFPEPVTVSWNSGALTSGVHTFPAVLQSSGLYSLSSVVTVPSSSLGTQTYICNVNHKPSNTKVDKKVEPKSCDKTHTCPPCPAPELLGGPSVFLFPPKPKDTLMISRTPEVTCVVVDVSHEDPEVKFNWYVDGVEVHNAKTKPREEQYNSTYRVVSVLTVLHQDWLNGKEYKCKVSNKALPAPIEKTISKAKGQPREPQVYTLPPSREEMTKNQVSLTCLVKGFYPSDIAVEWESNGQPENNYKTTPPVLDSDGSFFLYSKLTVDKSRWQQGNVFSCSVMHEALHNHYTQKSLSLSPGK

SEQ ID NO: 392 - protein, 120 aa, Artificial Sequence [sequence omitted]

SEQ ID NO: 393 - protein, 8 aa, Artificial Sequence
  source: /note="Description of Artificial Sequence: Synthetic peptide"
GFNIKDTY

SEQ ID NO: 394 - protein, 8 aa, Artificial Sequence
  source: /note="Description of Artificial Sequence: Synthetic peptide"
IYPTNGYT

SEQ ID NO: 395 - protein, 13 aa, Artificial Sequence
  source: /note="Description of Artificial Sequence: Synthetic peptide"
SRWGGDGFYAMDY

SEQ ID NO: 396 - protein, 214 aa, Artificial Sequence
  source: /note="Description of Artificial Sequence: Synthetic polypeptide"
DIQMTQSPSSLSASVGDRVTITCRASQDVNTAVAWYQQKPGKAPKLLIYSASFLYSGVPSRFSGSRSGTDFTLTISSLQPEDFATYYCQQHYTTPPTFGQGTKVEIKRTVAAPSVFIFPPSDEQLKSGTASVVCLLNNFYPREAKVQWKVDNALQSGNSQESVTEQDSKDSTYSLSSTLTLSKADYEKHKVYACEVTHQGLSSPVTKSFNRGEC

SEQ ID NO: 397 - protein, 107 aa, Artificial Sequence [sequence omitted]

SEQ ID NO: 398 - protein, 6 aa, Artificial Sequence
  source: /note="Description of Artificial Sequence: Synthetic peptide"
QDVNTA

SEQ ID NO: 399 - protein, 3 aa, Artificial Sequence
  source: /note="Description of Artificial Sequence: Synthetic peptide"
SAS

SEQ ID NO: 400 - protein, 9 aa, Artificial Sequence
  source: /note="Description of Artificial Sequence: Synthetic peptide"
QQHYTTPPT

SEQ ID NO: 401 - protein, 475 aa, Artificial Sequence
  source: /note="Description of Artificial Sequence: Synthetic polypeptide"
MDWTWRILFLVAAATGAHSQVQLVQSGAEVKKPGASVKVSCKASGYTFTGYYMHWVRQAPGQGLEWMGWINPDSGGTNYAQKFQGRVTMTRDTSISTAYMELNRLRSDDTAVYYCARDQPLGYCTNGVCSYFDYWGQGTLVTVSSASTKGPSVFPLAPCSRSTSESTAALGCLVKDYFPEPVTVSWNSGALTSGVHTFPAVLQSSGLYSLSSVVTVPSSNFGTQTYTCNVDHKPSNTKVDKTVEPKSCDKTHTCPPCPAPELLGGPSVFLFPPKPKDTLMISRTPEVTCVVVDVSHEDPEVKFNWYVDGVEVHNAKTKPREEQYNSTYRVVSVLTVLHQDWLNGKEYKCKVSNKALPAPIEKTISKAKGQPREPQVYTLPPSREEMTKNQVSLTCLVKGFYPSDIAVEWESNGQPENNYKTTPPVLDSDGSFFLYSKLTVDKSRWQQGNVFSCSVMHEALHNHYTQKSLSLSPGK

SEQ ID NO: 402 - protein, 471 aa, Artificial Sequence
  source: /note="Description of Artificial Sequence: Synthetic polypeptide"
MDWTWRILFLVAAATGAHSQVQLVQSGAEVKKPGASVKVSCKASGYTFTGYYMHWVRQAPGQGLEWMGWINPDSGGTNYAQKFQGRVTMTRDTSISTAYMELNRLRSDDTAVYYCARDQPLGYCTNGVCSYFDYWGQGTLVTVSSASTKGPSVFPLAPCSRSTSESTAALGCLVKDYFPEPVTVSWNSGALTSGVHTFPAVLQSSGLYSLSSVVTVPSSNFGTQTYTCNVDHKPSNTKVDKTVERKCCVECPPCPAPPVAGPSVFLFPPKPKDTLMISRTPEVTCVVVDVSHEDPEVQFNWYVDGVEVHNAKTKPREEQFNSTFRVVSVLTVVHQDWLNGKEYKCKVSNKGLPAPIEKTISKTKGQPREPQVYTLPPSREEMTKNQVSLTCLVKGFYPSDIAVEWESNGQPENNYKTTPPMLDSDGSFFLYSKLTVDKSRWQQGNVFSCSVMHEALHNHYTQKSLSLSPGK

SEQ ID NO: 403 - protein, 234 aa, Artificial Sequence
  source: /note="Description of Artificial Sequence: Synthetic polypeptide"
MRLPAQLLGLLLLWFPGSRCDIQMTQSPSSVSASVGDRVTITCRASQGIYSWLAWYQQKPGKAPNLLIYTASTLQSGVPSRFSGSGSGTDFTLTISSLQPEDFATYYCQQANIFPLTFGGGTKVEIKRTVAAPSVFIFPPSDEQLKSGTASVVCLLNNFYPREAKVQWKVDNALQSGNSQESVTEQDSKDSTYSLSSTLTLSKADYEKHKVYACEVTHQGLSSPVTKSFNRGEC

SEQ ID NO: 404 - protein, 444 aa, Artificial Sequence
  source: /note="Description of Artificial Sequence: Synthetic polypeptide"
EVQLVESGGGLVQPGGSLRLSCAASGYSFTGYYIHWVRQAPGKGLEWVARVIPNAGGTSYNQKFKGRFTLSVDNSKNTAYLQMNSLRAEDTAVYYCAREGIYWWGQGTLVTVSSASTKGPSVFPLAPSSKSTSGGTAALGCLVKDYFPEPVTVSWNSGALTSGVHTFPAVLQSSGLYSLSSVVTVPSSSLGTQTYICNVNHKPSNTKVDKKVEPKSCDKTHTCPPCPAPELLGGPSVFLFPPKPKDTLMISRTPEVTCVVVDVSHEDPEVKFNWYVDGVEVHNAKTKPREEQYNSTYRVVSVLTVLHQDWLNGKEYKCKVSNKALPAPIEKTISKAKGQPREPQVYTLPPSREEMTKNQVSLTCLVKGFYPSDIAVEWESNGQPENNYKTTPPVLDSDGSFFLYSKLTVDKSRWQQGNVFSCSVMHEALHNHYTQKSLSLSPGK

SEQ ID NO: 405 - protein, 114 aa, Artificial Sequence [sequence omitted]

SEQ ID NO: 406 - protein, 8 aa, Artificial Sequence
  source: /note="Description of Artificial Sequence: Synthetic peptide"
GYSFTGYY

SEQ ID NO: 407 - protein, 8 aa, Artificial Sequence
  source: /note="Description of Artificial Sequence: Synthetic peptide"
VIPNAGGT

SEQ ID NO: 408 - protein, 7 aa, Artificial Sequence
  source: /note="Description of Artificial Sequence: Synthetic peptide"
AREGIYW

SEQ ID NO: 409 - protein, 219 aa, Artificial Sequence
  source: /note="Description of Artificial Sequence: Synthetic polypeptide"
DIQMTQSPSSLSASVGDRVTITCRSSQSLVHSNGNTFLHWYQQKPGKAPKLLIYTVSNRFSGVPSRFSGSGSGTDFTLTISSLQPEDFATYFCSQTTHVPWTFGQGTKVEIKRTVAAPSVFIFPPSDEQLKSGTASVVCLLNNFYPREAKVQWKVDNALQSGNSQESVTEQDSKDSTYSLSSTLTLSKADYEKHKVYACEVTHQGLSSPVTKSFNRGEC

SEQ ID NO: 410 - protein, 112 aa, Artificial Sequence [sequence omitted]

SEQ ID NO: 411 - protein, 11 aa, Artificial Sequence
  source: /note="Description of Artificial Sequence: Synthetic peptide"
QSLVHSNGNTF

SEQ ID NO: 412 - protein, 3 aa, Artificial Sequence
  source: /note="Description of Artificial Sequence: Synthetic peptide"
TVS

SEQ ID NO: 413 - protein, 9 aa, Artificial Sequence
  source: /note="Description of Artificial Sequence: Synthetic peptide"
SQTTHVPWT

SEQ ID NO: 414 - protein, 448 aa, Artificial Sequence
  source: /note="Description of Artificial Sequence: Synthetic polypeptide"
QLQLQESGPGLLKPSETLSLTCTVSGGSISSPGYYGGWIRQPPGKGLEWIGSIYKSGSTYHNPSLKSRVTISVDTSKNQFSLKLSSVTAADTAVYYCTRPVVRYFGWFDPWGQGTLVTVSSASTKGPSVFPLAPCSRSTSESTAALGCLVKDYFPEPVTVSWNSGALTSGVHTFPAVLQSSGLYSLSSVVTVPSSSLGTKTYTCNVDHKPSNTKVDKRVESKYGPPCPPCPAPEFEGGPSVFLFPPKPKDTLMISRTPEVTCVVVDVSQEDPEVQFNWYVDGVEVHNAKTKPREEQFNSTYRVVSVLTVLHQDWLNGKEYKCKVSNKGLPSSIEKTISKAKGQPREPQVYTLPPSQEEMTKNQVSLTCLVKGFYPSDIAVEWESNGQPENNYKTTPPVLDSDGSFFLYSRLTVDKSRWQEGNVFSCSVMHEALHNHYTQKSLSLSLGK

SEQ ID NO: 415 - protein, 121 aa, Artificial Sequence
  source: /note="Description of Artificial Sequence: Synthetic polypeptide"
QLQLQESGPGLLKPSETLSLTCTVSGGSISSPGYYGGWIRQPPGKGLEWIGSIYKSGSTYHNPSLKSRVTISVDTSKNQFSLKLSSVTAADTAVYYCTRPVVRYFGWFDPWGQGTLVTVSS

SEQ ID NO: 416 - protein, 10 aa, Artificial Sequence
  source: /note="Description of Artificial Sequence: Synthetic peptide"
GGSISSPGYY

SEQ ID NO: 417 - protein, 7 aa, Artificial Sequence
  source: /note="Description of Artificial Sequence: Synthetic peptide"
IYKSGST

SEQ ID NO: 418 - protein, 13 aa, Artificial Sequence
  source: /note="Description of Artificial Sequence: Synthetic peptide"
TRPVVRYFGWFDP

SEQ ID NO: 419 - protein, 213 aa, Artificial Sequence
  source: /note="Description of Artificial Sequence: Synthetic polypeptide"
AIQLTQSPSSLSASVGDRVTITCRASQGISSALAWYQQKPGKAPKLLIYDASNLESGVPSRFSGSGSGTDFTLTISSLQPEDFATYYCQQFNSYPTFGQGTKVEIKRTVAAPSVFIFPPSDEQLKSGTASVVCLLNNFYPREAKVQWKVDNALQSGNSQESVTEQDSKDSTYSLSSTLTLSKADYEKHKVYACEVTHQGLSSPVTKSFNRGEC

SEQ ID NO: 420 - protein, 106 aa, Artificial Sequence
  source: /note="Description of Artificial Sequence: Synthetic polypeptide"
AIQLTQSPSSLSASVGDRVTITCRASQGISSALAWYQQKPGKAPKLLIYDASNLESGVPSRFSGSGSGTDFTLTISSLQPEDFATYYCQQFNSYPTFGQGTKVEIK

SEQ ID NO: 421 - protein, 6 aa, Artificial Sequence
  source: /note="Description of Artificial Sequence: Synthetic peptide"
QGISSA

SEQ ID NO: 422 - protein, 3 aa, Artificial Sequence
  source: /note="Description of Artificial Sequence: Synthetic peptide"
DAS

SEQ ID NO: 423 - protein, 8 aa, Artificial Sequence
  source: /note="Description of Artificial Sequence: Synthetic peptide"
QQFNSYPT

SEQ ID NO: 424 - protein, 450 aa, Artificial Sequence
  source: /note="Description of Artificial Sequence: Synthetic polypeptide"
QVQLVESGGGVVQPGRSLRLSCAASGFTFSSYGMHWVRQAPGKGLEWVAVISYEESNRYHADSVKGRFTISRDNSKITLYLQMNSLRTEDTAVYYCARDGGIAAPGPDYWGQGTLVTVSSASTKGPSVFPLAPASKSTSGGTAALGCLVKDYFPEPVTVSWNSGALTSGVHTFPAVLQSSGLYSLSSVVTVPSSSLGTQTYICNVNHKPSNTKVDKRVEPKSCDKTHTCPPCPAPELLGGPSVFLFPPKPKDTLMISRTPEVTCVVVDVSHEDPEVKFNWYVDGVEVHNAKTKPREEQYNSTYRVVSVLTVLHQDWLNGKEYKCKVSNKALPAPIEKTISKAKGQPREPQVYTLPPSREEMTKNQVSLTCLVKGFYPSDIAVEWESNGQPENNYKTTPPVLDSDGSFFLYSKLTVDKSRWQQGNVFSCSVMHEALHNHYTQKSLSLSPGK

SEQ ID NO: 425 - protein, 120 aa, Artificial Sequence
  source: /note="Description of Artificial Sequence: Synthetic polypeptide"
QVQLVESGGGVVQPGRSLRLSCAASGFTFSSYGMHWVRQAPGKGLEWVAVISYEESNRYHADSVKGRFTISRDNSKITLYLQMNSLRTEDTAVYYCARDGGIAAPGPDYWGQGTLVTVSS

SEQ ID NO: 426 - protein, 8 aa, Artificial Sequence
  source: /note="Description of Artificial Sequence: Synthetic peptide"
GFTFSSYG

SEQ ID NO: 427 - protein, 8 aa, Artificial Sequence
  source: /note="Description of Artificial Sequence: Synthetic peptide"
ISYEESNR

SEQ ID NO: 428 - protein, 13 aa, Artificial Sequence
  source: /note="Description of Artificial Sequence: Synthetic peptide"
ARDGGIAAPGPDY

SEQ ID NO: 429 - protein, 219 aa, Artificial Sequence
  source: /note="Description of Artificial Sequence: Synthetic polypeptide"
DIVMTQSPLSLTVTPGEPASISCRSSQSLLYSNGYNYLDWYLQKPGQSPQVLISLGSNRASGVPDRFSGSGSGTDFTLKISRVEAEDVGVYYCMQARQTPFTFGPGTKVDIRRTVAAPSVFIFPPSDEQLKSGTASVVCLLNNFYPREAKVQWKVDNALQSGNSQESVTEQDSKDSTYSLSSTLTLSKADYEKHKVYACEVTHQGLSSPVTKSFNRGEC

SEQ ID NO: 430 - protein, 112 aa, Artificial Sequence
  source: /note="Description of Artificial Sequence: Synthetic polypeptide"
DIVMTQSPLSLTVTPGEPASISCRSSQSLLYSNGYNYLDWYLQKPGQSPQVLISLGSNRASGVPDRFSGSGSGTDFTLKISRVEAEDVGVYYCMQARQTPFTFGPGTKVDIR

SEQ ID NO: 431 - protein, 11 aa, Artificial Sequence
  source: /note="Description of Artificial Sequence: Synthetic peptide"
QSLLYSNGYNY

SEQ ID NO: 432 - protein, 3 aa, Artificial Sequence
  source: /note="Description of Artificial Sequence: Synthetic peptide"
LGS

SEQ ID NO: 433 - protein, 9 aa, Artificial Sequence
  source: /note="Description of Artificial Sequence: Synthetic peptide"
MQARQTPFT

SEQ ID NO: 434 - protein, 447 aa, Artificial Sequence
  source: /note="Description of Artificial Sequence: Synthetic polypeptide"
EVQLLESGGGLVQPGGSLRLSCAASGFTFSTYGMHWVRQAPGKGLEWLSYISGGSSYIFYADSVRGRFTISRDNSENALYLQMNSLRAEDTAVYYCARILRGGSGMDLWGQGTLVTVSSASTKGPSVFPLAPSSKSTSGGTAALGCLVKDYFPEPVTVSWNSGALTSGVHTFPAVLQSSGLYSLSSWTVPSSSLGTQTYICNVNHKPSNTKVDKKVEPKSCDKTHTCPPCPAPELLGGPSVFLFPPKPKDTLMISRTPEVTCNAVDVSHEDPEVKFNWYVDGVEVHNAKTKPREEQYNSTYRWSVLTVLHQDWLNGKEYKCKVSNKALPAPIEKTISKAKGQPREPQVYTLPPSRDELTKNQVSLTCLVKGFYPSDIAVEWESNGQPENNYKTTPPVLDSDGSFFLYSKLTVDKSRWQQGNVFSCSVMHEALHNHYTQKSLSLSPGK

SEQ ID NO: 435 - protein, 119 aa, Artificial Sequence
  source: /note="Description of Artificial Sequence: Synthetic polypeptide"
EVQLLESGGGLVQPGGSLRLSCAASGFTFSTYGMHWVRQAPGKGLEWLSYISGGSSYIFYADSVRGRFTISRDNSENALYLQMNSLRAEDTAVYYCARILRGGSGMDLWGQGTLVTVSS

SEQ ID NO: 436 - protein, 8 aa, Artificial Sequence
  source: /note="Description of Artificial Sequence: Synthetic peptide"
GFTFSTYG

SEQ ID NO: 437 - protein, 8 aa, Artificial Sequence
  source: /note="Description of Artificial Sequence: Synthetic peptide"
ISGGSSYI

SEQ ID NO: 438 - protein, 12 aa, Artificial Sequence
  source: /note="Description of Artificial Sequence: Synthetic peptide"
ARILRGGSGMDL

SEQ ID NO: 439 - protein, 217 aa, Artificial Sequence
  source: /note="Description of Artificial Sequence: Synthetic polypeptide"
QSVLTQPPSASGTPGQRVTISCTGSSSNIGAGYNVYWYQQLPGTAPKLLIYGNINRPSGVPDRFSGSKSGTSASLAISGLRSEDEADYYCAAWDKSISGLVFGGGTKLTVLGQPKAAPSVTLFPPSSEELQANKATLVCLISDFYPGAVTVAWKADSSPVKAGVETTTPSKQSNNKYAASSYLSLTPEQWKSHRSYSCQVTHEGSTVEKTVAPTECS

SEQ ID NO: 440 - protein, 111 aa, Artificial Sequence
  source: /note="Description of Artificial Sequence: Synthetic polypeptide"
QSVLTQPPSASGTPGQRVTISCTGSSSNIGAGYNVYWYQQLPGTAPKLLIYGNINRPSGVPDRFSGSKSGTSASLAISGLRSEDEADYYCAAWDKSISGLVFGGGTKLTVL

SEQ ID NO: 441 - protein, 9 aa, Artificial Sequence
  source: /note="Description of Artificial Sequence: Synthetic peptide"
SSNIGAGYN

SEQ ID NO: 442 - protein, 3 aa, Artificial Sequence
  source: /note="Description of Artificial Sequence: Synthetic peptide"
GNI

SEQ ID NO: 443 - protein, 11 aa, Artificial Sequence
  source: /note="Description of Artificial Sequence: Synthetic peptide"
AAWDKSISGLV

SEQ ID NO: 444 - protein, 450 aa, Artificial Sequence
  source: /note="Description of Artificial Sequence: Synthetic polypeptide"
QVQLVESGGGVVQPGRSLRLSCAASGFSFSSTYVCWVRQAPGKGLEWIACIYTGDGTNYSASWAKGRFTISKDSSKNTVYLQMNSLRAEDTAVYFCARPDITYGFAINFWGPGTLVTVSSASTKGPSVFPLAPSSKSTSGGTAALGCLVKDYFPEPVTVSWNSGALTSGVHTFPAVLQSSGLYSLSSVVTVPSSSLGTQTYICNVNHKPSNTKVDKKVEPKSCDKTHTCPPCPAPELLGGPSVFLFPPKPKDTLMISRTPEVTCVVVDVSHEDPEVKFNWYVDGVEVHNAKTKPREEQYNSTYRVVSVLTVLHQDWLNGKEYKCKVSNKALPAPIEKTISKAKGQPREPQVYTLPPSREEMTKNQVSLTCLVKGFYPSDIAVEWESNGQPENNYKTTPPVLDSDGSFFLYSKLTVDKSRWQQGNVFSCSVMHEALHNHYTQKSLSLSPGK

SEQ ID NO: 445 - protein, 120 aa, Artificial Sequence
  source: /note="Description of Artificial Sequence: Synthetic polypeptide"
QVQLVESGGGVVQPGRSLRLSCAASGFSFSSTYVCWVRQAPGKGLEWIACIYTGDGTNYSASWAKGRFTISKDSSKNTVYLQMNSLRAEDTAVYFCARPDITYGFAINFWGPGTLVTVSS

SEQ ID NO: 446 - protein, 8 aa, Artificial Sequence
  source: /note="Description of Artificial Sequence: Synthetic peptide"
GFSFSSTY

SEQ ID NO: 447 - protein, 8 aa, Artificial Sequence
  source: /note="Description of Artificial Sequence: Synthetic peptide"
IYTGDGTN

SEQ ID NO: 448 - protein, 14 aa, Artificial Sequence
  source: /note="Description of Artificial Sequence: Synthetic peptide"
ARPDITYGFAINFW

SEQ ID NO: 449 - protein, 215 aa, Artificial Sequence
  source: /note="Description of Artificial Sequence: Synthetic polypeptide"
DIQMTQSPSSLSASVGDRVTIKCQASQSISSRLAWYQQKPGKPPKLLIYRASTLASGVPSRFSGSGSGTDFTLTISSLQPEDVATYYCQCTGYGISWPIGGGTKVEIKRTVAAPSVFIFPPSDEQLKSGTASVVCLLNNFYPREAKVQWKVDNALQSGNSQESVTEQDSKDSTYSLSSTLTLSKADYEKHKVYACEVTHQGLSSPVTKSFNRGEC

SEQ ID NO: 450 - protein, 108 aa, Artificial Sequence
  source: /note="Description of Artificial Sequence: Synthetic polypeptide"
DIQMTQSPSSLSASVGDRVTIKCQASQSISSRLAWYQQKPGKPPKLLIYRASTLASGVPSRFSGSGSGTDFTLTISSLQPEDVATYYCQCTGYGISWPIGGGTKVEIK

SEQ ID NO: 451 - protein, 6 aa, Artificial Sequence
  source: /note="Description of Artificial Sequence: Synthetic peptide"
QSISSR

SEQ ID NO: 452 - protein, 3 aa, Artificial Sequence
  source: /note="Description of Artificial Sequence: Synthetic peptide"
RAS

SEQ ID NO: 453 - protein, 10 aa, Artificial Sequence
  source: /note="Description of Artificial Sequence: Synthetic peptide"
QCTGYGISWP

SEQ ID NO: 454 - protein, 452 aa, Artificial Sequence
  source: /note="Description of Artificial Sequence: Synthetic polypeptide"
EVQLQQSGPDLVKPGASVKISCKTSGYTFTEYIMHWVKQSHGKSLEWIGGIIPNNGGTSYNQKFKDKATMTVDKSSSTGYMELRSLTSEDSAVYYCTRREVYGRNYYALDYWGQGTLVTVSSASTKGPSVFPLAPSSKSTSGGTAALGCLVKDYFPEPVTVSWNSGALTSGVHTFPAVLQSSGLYSLSSVVTVPSSSLGTQTYICNVNHKPSNTKVDKKVEPKSCDKTHTCPPCPAPELLGGPSVFLFPPKPKDTLMISRTPEVTCVVVDVSHEDPEVKFNWYVDGVEVHNAKTKPREEQYNSTYRVVSVLTVLHQDWLNGKEYKCKVSNKALPAPIEKTISKAKGQPREPQVYTLPPSREEMTKNQVSLTCLVKGFYPSDIAVEWESNGQPENNYKTTPPVLDSDGSFFLYSKLTVDKSRWQQGNVFSCSVMHEALHNHYTQKSLSLSPGK

SEQ ID NO: 455 - protein, 122 aa, Artificial Sequence
  source: /note="Description of Artificial Sequence: Synthetic polypeptide"
EVQLQQSGPDLVKPGASVKISCKTSGYTFTEYIMHWVKQSHGKSLEWIGGIIPNNGGTSYNQKFKDKATMTVDKSSSTGYMELRSLTSEDSAVYYCTRREVYGRNYYALDYWGQGTLVTVSS

SEQ ID NO: 456 - protein, 8 aa, Artificial Sequence
  source: /note="Description of Artificial Sequence: Synthetic peptide"
GYTFTEYI

SEQ ID NO: 457 - protein, 8 aa, Artificial Sequence
  source: /note="Description of Artificial Sequence: Synthetic peptide"
IIPNNGGT

SEQ ID NO: 458 - protein, 15 aa, Artificial Sequence
  source: /note="Description of Artificial Sequence: Synthetic peptide"
TRREVYGRNYYALDY

SEQ ID NO: 459 - protein, 214 aa, Artificial Sequence
  source: /note="Description of Artificial Sequence: Synthetic polypeptide"
DIQMTQTTSSLSASLGDRVTITCSASQGINNYLNWYQQKPDGTVKLLIYYTSSLHSGVPSRFSGSGSGTDYSLTISNLEPEDIATYYCQQYSNLPYTFGGGTKLEIKRTVAAPSVFIFPPSDEQLKSGTASVVCLLNNFYPREAKVQWKVDNALQSGNSQESVTEQDSKDSTYSLSSTLTLSKADYEKHKVYACEVTHQGLSSPVTKSFNRGEC

SEQ ID NO: 460 - protein, 107 aa, Artificial Sequence
  source: /note="Description of Artificial Sequence: Synthetic polypeptide"
DIQMTQTTSSLSASLGDRVTITCSASQGINNYLNWYQQKPDGTVKLLIYYTSSLHSGVPSRFSGSGSGTDYSLTISNLEPEDIATYYCQQYSNLPYTFGGGTKLEIK

SEQ ID NO: 461 - protein, 6 aa, Artificial Sequence
  source: /note="Description of Artificial Sequence: Synthetic peptide"
QGINNY

SEQ ID NO: 462 - protein, 3 aa, Artificial Sequence
  source: /note="Description of Artificial Sequence: Synthetic peptide"
YTS

SEQ ID NO: 463 - protein, 9 aa, Artificial Sequence
  source: /note="Description of Artificial Sequence: Synthetic peptide"
QQYSNLPYT

SEQ ID NO: 464 - protein, 448 aa, Artificial Sequence
  source: /note="Description of Artificial Sequence: Synthetic polypeptide"
QVQLVESGGGVVQPGRSLRLSCAASGFTFSNYGMYWVRQAPGKGLEWVAVIWYDGSNKYYADSVKGRFTISRDNSKNTLYLQMNSLRAEDTAVYYCARDLWGWYFDYWGQGTLVTVSSASTKGPSVFPLAPSSKSTSGGTAALGCLVKDYFPEPVTVSWNSGALTSGVHTFPAVLQSSGLYSLSSVVTVPSSSLGTQTYICNVNHKPSNTKVDKKVEPKSCDKTHTCPPCPAPELLGGPSVFLFPPKPKDTLMISRTPEVTCVVVDVSHEDPEVKFNWYVDGVEVHNAKTKPREEQYNSTYRVVSVLTVLHQDWLNGKEYKCKVSNKALPAPIEKTISKAKGQPREPQVYTLPPSREEMTKNQVSLTCLVKGFYPSDIAVEWESNGQPENNYKTTPPVLDSDGSFFLYSKLTVDKSRWQQGNVFSCSVMHEALHNHYTQKSLSLSPGK

SEQ ID NO: 465 - protein, 118 aa, Artificial Sequence
  source: /note="Description of Artificial Sequence: Synthetic polypeptide"
QVQLVESGGGVVQPGRSLRLSCAASGFTFSNYGMYWVRQAPGKGLEWVAVIWYDGSNKYYADSVKGRFTISRDNSKNTLYLQMNSLRAEDTAVYYCARDLWGWYFDYWGQGTLVTVSS

SEQ ID NO: 466 - protein, 8 aa, Artificial Sequence
  source: /note="Description of Artificial Sequence: Synthetic peptide"
GFTFSNYG

SEQ ID NO: 467 - protein, 8 aa, Artificial Sequence
  source: /note="Description of Artificial Sequence: Synthetic peptide"
IWYDGSNK

SEQ ID NO: 468 - protein, 11 aa, Artificial Sequence
  source: /note="Description of Artificial Sequence: Synthetic peptide"
ARDLWGWYFDY

SEQ ID NO: 469 - protein, 214 aa, Artificial Sequence
  source: /note="Description of Artificial Sequence: Synthetic polypeptide"
EIVLTQSPATLSLSPGERATLSCRASQSVSSYLAWYQQKPGQAPRLLIYDASNRATGIPARFSGSGSGTDFTLTISSLEPEDFAVYYCQQRRNWPLTFGGGTKVEIKRTVAAPSVFIFPPSDEQLKSGTASVVCLLNNFYPREAKVQWKVDNALQSGNSQESVTEQDSKDSTYSLSSTLTLSKADYEKHKVYACEVTHQGLSSPVTKSFNRGEC

SEQ ID NO: 470 - protein, 107 aa, Artificial Sequence
  source: /note="Description of Artificial Sequence: Synthetic polypeptide"
EIVLTQSPATLSLSPGERATLSCRASQSVSSYLAWYQQKPGQAPRLLIYDASNRATGIPARFSGSGSGTDFTLTISSLEPEDFAVYYCQQRRNWPLTFGGGTKVEIK

SEQ ID NO: 471 - protein, 6 aa, Artificial Sequence
  source: /note="Description of Artificial Sequence: Synthetic peptide"
QSVSSY

SEQ ID NO: 472 - protein, 3 aa, Artificial Sequence
  source: /note="Description of Artificial Sequence: Synthetic peptide"
DAS

SEQ ID NO: 473 - protein, 9 aa, Artificial Sequence
  source: /note="Description of Artificial Sequence: Synthetic peptide"
QQRRNWPLT

SEQ ID NO: 474 - protein, 446 aa, Artificial Sequence
  source: /note="Description of Artificial Sequence: Synthetic polypeptide"
EVQLVQSGAEVKKPGESLRISCKGSGDSFTTYWIGWVRQMPGKGLEWMGIIYPGDSDTIYSPSFQGQVTISADKSISTAYLQWSSLKASDTAMYYCTRGDRGVDYWGQGTLVTVSSASTKGPSVFPLAPSSKSTSGGTAALGCLVKDYFPEPVTVSWNSGALTSGVHTFPAVLQSSGLYSLSSVVTVPSSSLGTQTYICNVNHKPSNTKVDKKVEPKSCDKTHTCPPCPAPELLGGPSVFLFPPKPKDTLMISRTPEVTCVVVDVSHEDPEVKFNWYVDGVEVHNAKTKPREEQYNSTYRVVSVLTVLHQDWLNGKEYKCKVSNKALPAPIEKTISKAKGQPREPQVYTLPPSREEMTKNQVSLTCLVKGFYPSDIAVEWESNGQPENNYKTTPPVLDSDGSFFLYSKLTVDKSRWQQGNVFSCSVMHEALHNHYTQKSLSLSPGK

SEQ ID NO: 475 - protein, 116 aa, Artificial Sequence
  source: /note="Description of Artificial Sequence: Synthetic polypeptide"
EVQLVQSGAEVKKPGESLRISCKGSGDSFTTYWIGWVRQMPGKGLEWMGIIYPGDSDTIYSPSFQGQVTISADKSISTAYLQWSSLKASDTAMYYCTRGDRGVDYWGQGTLVTVSS

SEQ ID NO: 476 - protein, 8 aa, Artificial Sequence
  source: /note="Description of Artificial Sequence: Synthetic peptide"
GDSFTTYW

SEQ ID NO: 477 - protein, 8 aa, Artificial Sequence
  source: /note="Description of Artificial Sequence: Synthetic peptide"
IYPGDSDT

SEQ ID NO: 478 - protein, 9 aa, Artificial Sequence
  source: /note="Description of Artificial Sequence: Synthetic peptide"
TRGDRGVDY

SEQ ID NO: 479 - protein, 214 aa, Artificial Sequence
  source: /note="Description of Artificial Sequence: Synthetic polypeptide"
DIQMTQSPSSLSASVGDRVTITCRASQGISRWLAWYQQKPEKAPKSLIYAASSLQSGVPSRFSGSGSGTDFTLTISGLQPEDFATYYCQQYNSYPRTFGQGTKVEIKRTVAAPSVFIFPPSDEQLKSGTASVVCLLNNFYPREAKVQWKVDNALQSGNSQESVTEQDSKDSTYSLSSTLTLSKADYEKHKVYACEVTHQGLSSPVTKSFNRGEC

SEQ ID NO: 480 - protein, 107 aa, Artificial Sequence
  source: /note="Description of Artificial Sequence: Synthetic polypeptide"
DIQMTQSPSSLSASVGDRVTITCRASQGISRWLAWYQQKPEKAPKSLIYAASSLQSGVPSRFSGSGSGTDFTLTISGLQPEDFATYYCQQYNSYPRTFGQGTKVEIK

SEQ ID NO: 481 - protein, 6 aa, Artificial Sequence
  source: /note="Description of Artificial Sequence: Synthetic peptide"
QGISRW

SEQ ID NO: 482 - protein, 3 aa, Artificial Sequence
  source: /note="Description of Artificial Sequence: Synthetic peptide"
AAS

SEQ ID NO: 483 - protein, 9 aa, Artificial Sequence
  source: /note="Description of Artificial Sequence: Synthetic peptide"
QQYNSYPRT

SEQ ID NO: 484 - protein, 448 aa, Artificial Sequence
  source: /note="Description of Artificial Sequence: Synthetic polypeptide"
QVQLQESGPGLVKPSETLSLTCVVSGGSISSSNWWSWVRQPPGKGLEWIGEIYHSGSPDYNPSLKSRVTISVDKSRNQFSLKLSSVTAADTAVYYCAKVSTGGFFDYWGQGTLVTVSSASTKGPSVFPLAPSSKSTSGGTAALGCLVKDYFPEPVTVSWNSGALTSGVHTFPAVLQSSGLYSLSSVVTVPSSSLGTQTYICNVNHKPSNTKVDKRVEPKSCDKTHTCPPCPAPELLGGPSVFLFPPKPKDTLMISRTPEVTCVVVDVSHEDPEVKFNWYVDGVEVHNAKTKPREEQYNSTYRVVSVLTVLHQDWLNGKEYKCKVSNKALPAPIEKTISKAKGQPREPQVYTLPPSREEMTKNQVSLTCLVKGFYPSDIAVEWESNGQPENNYKTTPPVLDSDGSFFLYSKLTVDKSRWQQGNVFSCSVMHEALHNHYTQKSLSLSPGK

SEQ ID NO: 485 - protein, 448 aa, Artificial Sequence
  source: /note="Description of Artificial Sequence: Synthetic polypeptide"
QVQLQESGPGLVKPSETLSLTCVVSGGSISSSNWWSWVRQPPGKGLEWIGEIYHSGSPNYNPSLKSRVTISVDKSKNQFSLKLSSVTAADTAVYYCARSSSGGFFDYWGQGTLVTVSSASTKGPSVFPLAPSSKSTSGGTAALGCLVKDYFPEPVTVSWNSGALTSGVHTFPAVLQSSGLYSLSSVVTVPSSSLGTQTYICNVNHKPSNTKVDKRVEPKSCDKTHTCPPCPAPELLGGPSVFLFPPKPKDTLMISRTPEVTCVVVDVSHEDPEVKFNWYVDGVEVHNAKTKPREEQYNSTYRVVSVLTVLHQDWLNGKEYKCKVSNKALPAPIEKTISKAKGQPREPQVYTLPPSREEMTKNQVSLTCLVKGFYPSDIAVEWESNGQPENNYKTTPPVLDSDGSFFLYSKLTVDKSRWQQGNVFSCSVMHEALHNHYTQKSLSLSPGK

SEQ ID NO: 486 - protein, 448 aa, Artificial Sequence
  source: /note="Description of Artificial Sequence: Synthetic polypeptide"
QVQLQESGPGLVKPSETLSLTCVVSGGSISSSNWWSWVRQPPGKGLEWIGEIYHSGSPNYNPSLKSRVTISVDKSKNQFSLKLSSVTAADTAVYYCARQTTAGSFDYWGQGTLVTVSSASTKGPSVFPLAPSSKSTSGGTAALGCLVKDYFPEPVTVSWNSGALTSGVHTFPAVLQSSGLYSLSSVVTVPSSSLGTQTYICNVNHKPSNTKVDKRVEPKSCDKTHTCPPCPAPELLGGPSVFLFPPKPKDTLMISRTPEVTCVVVDVSHEDPEVKFNWYVDGVEVHNAKTKPREEQYNSTYRVVSVLTVLHQDWLNGKEYKCKVSNKALPAPIEKTISKAKGQPREPQVYTLPPSREEMTKNQVSLTCLVKGFYPSDIAVEWESNGQPENNYKTTPPVLDSDGSFFLYSKLTVDKSRWQQGNVFSCSVMHEALHNHYTQKSLSLSPGK

SEQ ID NO: 487 - protein, 214 aa, Artificial Sequence
  source: /note="Description of Artificial Sequence: Synthetic polypeptide"
DIQMTQSPSSLSASVGDRVTITCRASQSISSYLNWYQQKPGKAPKLLIYAASSLQSGVPSRFSGSGSGTDFTLTISSLQPEDFATYYCQQSYSTPPTFGQGTKVEIKRTVAAPSVFIFPPSDEQLKSGTASVVCLLNNFYPREAKVQWKVDNALQSGNSQESVTEQDSKDSTYSLSSTLTLSKADYEKHKVYACEVTHQGLSSPVTKSFNRGEC

SEQ ID NO: 488 - protein, 450 aa, Artificial Sequence
  source: /note="Description of Artificial Sequence: Synthetic polypeptide"
QVQLVESGGGVVQPGRSLRLSCAASGFTLSSYGMHWVRQAPGKGLEWVAVIWYDGNDKYYADSVKGRFTISRDNSKNTLYLQVNSLRAEDTAVYYCARGTGTPYWYFDLWGRGTLVTVSSASTKGPSVFPLAPSSKSTSGGTAALGCLVKDYFPEPVTVSWNSGALTSGVHTFPAVLQSSGLYSLSSVVTVPSSSLGTQTYICNVNHKPSNTKVDKKVEPKSCDKTHTCPPCPAPELLGGPSVFLFPPKPKDTLMISRTPEVTCVVVDVSHEDPEVKFNWYVDGVEVHNAKTKPREEQYNSTYRVVSVLTVLHQDWLNGKEYKCKVSNKALPAPIEKTISKAKGQPREPQVYTLPPSRDELTKNQVSLTCLVKGFYPSDIAVEWESNGQPENNYKTTPPVLDSDGSFFLYSKLTVDKSRWQQGNVFSCSVMHEALHNHYTQKSLSLSPGK

SEQ ID NO: 489 - protein, 215 aa, Artificial Sequence
  source: /note="Description of Artificial Sequence: Synthetic polypeptide"
EIVLTQSPATLSLSPGERATLSCRASQSVNNYLAWYQQKPGQAPRLLIYDASNRATGIPARFSGSGSGTDFTLTISSLEPEDFAVYYCQQRSTWPPYTFGQGTKLEIKRTVAAPSVFIFPPSDEQLKSGTASVVCLLNNFYPREAKVQWKVDNALQSGNSQESVTEQDSKDSTYSLSSTLTLSKADYEKHKVYACEVTHQGLSSPVTKSFNRGEC

SEQ ID NO: 490 - protein, 450 aa, Artificial Sequence
  source: /note="Description of Artificial Sequence: Synthetic polypeptide"
EVQLVESGGGLVQPGGSLRLSCAASGFTFSNYLMNWVRQAPGKGLEWVANIEQDGSEKYYVDSVKGRFTISRDNAKNSLYLQMNSLRAEDTAVYFCARDGDTAMITFDFWGQGTLVTVSSASTKGPSVFPLAPSSKSTSGGTAALGCLVKDYFPEPVTVSWNSGALTSGVHTFPAVLQSSGLYSLSSVVTVPSSSLGTQTYICNVNHKPSNTKVDKKVEPKSCDKTHTCPPCPAPELLGGPSVFLFPPKPKDTLMISRTPEVTCVVVDVSHEDPEVKFNWYVDGVEVHNAKTKPREEQYNSTYRVVSVLTVLHQDWLNGKEYKCKVSNKALPAPIEKTISKAKGQPREPQVYTLPPSRDELTKNQVSLTCLVKGFYPSDIAVEWESNGQPENNYKTTPPVLDSDGSFFLYSKLTVDKSRWQQGNVFSCSVMHEALHNHYTQKSLSLSPGK

SEQ ID NO: 491 - protein, 214 aa, Artificial Sequence
  source: /note="Description of Artificial Sequence: Synthetic polypeptide"
DIQMTQSPSSVSASVGDRVTITCRASQGIRRWLAWYQQKPGKAPKLLIYAASSLQRGVPSRFSGSGSGTDFTLTISSLQPEDFATYYCQQANSFPWTFGQGTKVEIKRTVAAPSVFIFPPSDEQLKSGTASVVCLLNNFYPREAKVQWKVDNALQSGNSQESVTEQDSKDSTYSLSSTLTLSKADYEKHKVYACEVTHQGLSSPVTKSFNRGEC

SEQ ID NO: 492 - protein, 452 aa, Artificial Sequence
  source: /note="Description of Artificial Sequence: Synthetic polypeptide"
QVQLQESGPGLVKPSQTLSLTCTVSGGSISSGGYYWNWIRQHPGKGLEWIGYIYYSGNTYYNPSLKSRVTISVDTSKNQFSLKLSSVTAADAAVYHCARGYGDYGGGYFDYWGQGTLVTVSSASTKGPSVFPLAPSSKSTSGGTAALGCLVKDYFPEPVTVSWNSGALTSGVHTFPAVLQSSGLYSLSSVVTVPSSSLGTQTYICNVNHKPSNTKVDKKVEPKSCDKTHTCPPCPAPELLGGPSVFLFPPKPKDTLMISRTPEVTCVVVDVSHEDPEVKFNWYVDGVEVHNAKTKPREEQYNSTYRVVSVLTVLHQDWLNGKEYKCKVSNKALPAPIEKTISKAKGQPREPQVYTLPPSRDELTKNQVSLTCLVKGFYPSDIAVEWESNGQPENNYKTTPPVLDSDGSFFLYSKLTVDKSRWQQGNVFSCSVMHEALHNHYTQKSLSLSPGK

SEQ ID NO: 493 - protein, 214 aa, Artificial Sequence
  source: /note="Description of Artificial Sequence: Synthetic polypeptide"
DIQMTQSPSSLSASVGDRVTITCQASQDISNYLNWYQQKPGKAPKFLIYDVSNLETGVPSRFSGSGSGTDFTFTISSLQPEDIATYYCQQYDNLPYTFGQGTKLEIKRTVAAPSVFIFPPSDEQLKSGTASVVCLLNNFYPREAKVQWKVDNALQSGNSQESVTEQDSKDSTYSLSSTLTLSKADYEKHKVYACEVTHQGLSSPVTKSFNRGEC

SEQ ID NO: 494 - protein, 123 aa, Artificial Sequence
  source: /note="Description of Artificial Sequence: Synthetic polypeptide"
EVKLQESGGGFVKPGGSLKVSCAASGFTFSSYAMSWVRLSPEMRLEWVATISSAGGYIFYSDSVQGRFTISRDNAKNTLHLQMGSLRSGDTAMYYCARQGFGNYGDYYAMDYWGQGTTVTVSS

SEQ ID NO: 495 - protein, 112 aa, Artificial Sequence
  source: /note="Description of Artificial Sequence: Synthetic polypeptide"
DIELTQSPSSLAVSAGEKVTMSCKSSQSLLNSRTRKNQLAWYQQKPGQSPELLIYWASTRQSGVPDRFTGSGSGTDFTLTISSVQAEDLAVYYCQQSYNLLTFGPGTKLEVK

SEQ ID NO: 496 - protein, 123 aa, Artificial Sequence
  source: /note="Description of Artificial Sequence: Synthetic polypeptide"
EVKLEESGGGFVKPGGSLKISCAASGFTFRNYAMSWVRLSPEMRLEWVATISSAGGYIFYSDSVQGRFTISRDNAKNTLHLQMGSLRSGDTAMYYCARQGFGNYGDYYAMDYWGQGTTVTVSS

SEQ ID NO: 497 - protein, 112 aa, Artificial Sequence
  source: /note="Description of Artificial Sequence: Synthetic polypeptide"
DIELTQSPSSLAVSAGEKVTMSCKSSQSLLNSRTRKNQLAWYQQKTGQSPELLIYWASTRQSGVPDRFTGSGSGTDFTLTISSVQAEDLAVYYCQQSYNLLTFGPGTKLEIK

SEQ ID NO: 498 - protein, 121 aa, Artificial Sequence
  source: /note="Description of Artificial Sequence: Synthetic polypeptide"
EVKLVESGGGLVQPGGSLRLSCATSGFTFTDYYMNWVRQPPGKALEWLGFIGNKANGYTTEYSASVKGRFTISRDKSQSILYLQMNTLRAEDSATYYCTRDRGLRFYFDYWGQGTTLTVSS

SEQ ID NO: 499 - protein, 106 aa, Artificial Sequence
  source: /note="Description of Artificial Sequence: Synthetic polypeptide"
QTVLSQSPAILSASPGEKVTMTCRASSSVTYIHWYQQKPGSSPKSWIYATSNLASGVPARFSGSGSGTSYSLTISRVEAEDAATYYCQHWSSKPPTFGGGTKLEIK

SEQ ID NO: 500 - protein, 119 aa, Artificial Sequence
  source: /note="Description of Artificial Sequence: Synthetic polypeptide"
QVQLQQSGPELEKPGASVKISCKASGYSFTGYTMNWVKQSHGKSLEWIGLITPYNGASSYNQKFRGKATLTVDKSSSTAYMDLLSLTSEDSAVYFCARGGYDGRGFDYWGSGTPVTVSS

SEQ ID NO: 501 - protein, 106 aa, Artificial Sequence
  source: /note="Description of Artificial Sequence: Synthetic polypeptide"
DIELTQSPAIMSASPGEKVTMTCSASSSVSYMHWYQQKSGTSPKRWIYDTSKLASGVPGRFSGSGSGNSYSLTISSVEAEDDATYYCQQWSKHPLTFGSGTKVEIK

SEQ ID NO: 502 - protein, 120 aa, Artificial Sequence
  source: /note="Description of Artificial Sequence: Synthetic polypeptide"
MQVQLVQSGAEVKKPGASVKVSCKASGYSFTGYTMNWVRQAPGQGLEWMGLITPYNGASSYNQKFRGKATMTVDTSTSTVYMELSSLRSEDTAVYYCARGGYDGRGFDYWGQGTLVTVSS

SEQ ID NO: 503 - protein, 107 aa, Artificial Sequence
  source: /note="Description of Artificial Sequence: Synthetic polypeptide"
MDIQMTQSPSSLSASVGDRVTITCSASSSVSYMHWYQQKSGKAPKLLIYDTSKLASGVPSRFSGSGSGTDFTLTISSLQPEDFATYYCQQWSKHPLTFGQGTKLEIK

SEQ ID NO: 504 - protein, 118 aa, Artificial Sequence [sequence omitted]

SEQ ID NO: 505 - protein, 107 aa, Artificial Sequence [sequence omitted]

SEQ ID NO: 506 - protein, 123 aa, Artificial Sequence
  source: /note="Description of Artificial Sequence: Synthetic polypeptide"
QVQLVQSGAEVKKPGSSVKVSCKTSGDTFSTYAISWVRQAPGQGLEWMGGIIPIFGKAHYAQKFQGRVTITADESTSTAYMELSSLRSEDTAVYFCARKFHFVSGSPFGMDVWGQGTTVTVSS

SEQ ID NO: 507 - protein, 106 aa, Artificial Sequence
  source: /note="Description of Artificial Sequence: Synthetic polypeptide"
EIVLTQSPATLSLSPGERATLSCRASQSVSSYLAWYQQKPGQAPRLLIYDASNRATGIPARFSGSGSGTDFTLTISSLEPEDFAVYYCQQRSNWPTFGQGTKVEIK

SEQ ID NO: 508 - protein, 121 aa, Artificial Sequence
  source: /note="Description of Artificial Sequence: Synthetic polypeptide"
QVQLQESGPGLVKPSQTLSLTCAISGDSVSSNSVTWNWIRQSPSRGLEWLGRTYYRSKWYNDYAVSVKGRITINPDTSKNQFYLQLKSVTPEDAAVYYCARDSSILYGDYWGQGTLVTVSS

SEQ ID NO: 509 - protein, 120 aa, Artificial Sequence
  source: /note="Description of Artificial Sequence: Synthetic polypeptide"
QVQLQQSGPGLVKPSQTLSLTCAISGDSVSSNSVTWNWIRQSPSRGLEWLGRTYYRSKWYNDYAVSVKGRITINPDTSKNQFYLQLKSVTPEDAAVYYCARDSSILYGDYWGQGTLVTVS

SEQ ID NO: 510 - protein, 115 aa, Artificial Sequence
  source: /note="Description of Artificial Sequence: Synthetic polypeptide"
QAVLTQPSSLSASPGASASLTCTLPSGINVGTYRIFWFQQKPGSPPQYLLSYKSDSDNHQGSGVPSRFSGSKDASANAGILLISGLQSEDEADYYCMIWHSSAWVFGGGTKLTVL

SEQ ID NO: 511 - protein, 122 aa, Artificial Sequence
  source: /note="Description of Artificial Sequence: Synthetic polypeptide"
QVQLVQSGAEVKKPGASVKVSCKTSGYTFTDYYIHWVRQAPGQGLEWMGWINPNRGGTNYAQKFQGRVTMTRDTSIATAYMELSRLRSDDTAVYYCATASLKIAAVGTFDCWGQGTLVTVSS

SEQ ID NO: 512 - protein, 107 aa, Artificial Sequence
  source: /note="Description of Artificial Sequence: Synthetic polypeptide"
SYELTQPPSVSVSPGQTARITCSGDALSKQYAFWFQQKPGQAPILVIYQDTKRPSGIPGRFSGSSSGTTVTLTISGAQADDEADYYCQSADSSGTYVFGTGTKVTVL

SEQ ID NO: 513 - protein, 116 aa, Artificial Sequence
  source: /note="Description of Artificial Sequence: Synthetic polypeptide"
EVQLVETGGGVVQPGRSLRLSCAASGFSFSTHGMYWVRQPPGKGLEWVAVISYDGSDKKYADSVKGRFTISRDNSKNTVYLEMSSVRAEDTALYYCFCRRDAFDLWGQGTMVTVSS

SEQ ID NO: 514 - protein, 108 aa, Artificial Sequence
  source: /note="Description of Artificial Sequence: Synthetic polypeptide"
SYVLTQPPSVSVSPGQTARITCSGDALPKKYAYWYQQKSGQAPVLVIYEDTKRPSGIPERFSGSSSGTMATLTISGAQVEDEADYYCYSTDSSGNYWVFGGGTEVTVL

SEQ ID NO: 515 - protein, 124 aa, Artificial Sequence
  source: /note="Description of Artificial Sequence: Synthetic polypeptide"
EVQLVESGGGLVEPGGSLRLSCAASGFTFSDAWMNWVRQAPGKGLEWVGRIKTKSDGGTTDYAAPVRGRFSISRDDSKNTLFLEMNSLKTEDTAIYYCFITVIVVSSESPLDHWGQGTLVTVSS

SEQ ID NO: 516 - protein, 108 aa, Artificial Sequence
  source: /note="Description of Artificial Sequence: Synthetic polypeptide"
SYELTQPPSVSVSPGQTARITCSGDELPKQYAYWYQQKPGQAPVLVIYKDRQRPSGIPERFSGSSSGTTVTLTISGVQAEDEADYYCQSAYSINTYVIFGGGTKLTVL

SEQ ID NO: 517 - protein, 125 aa, Artificial Sequence
  source: /note="Description of Artificial Sequence: Synthetic polypeptide"
EVQLVESGGGLVKPGGSLRLSCAASGFTFSDYYMSWIRQAPGKGLEWISYISSGSSYTNYADSVKGRFTISRDNAKKSVYLEVNGLTVEDTAVYYCARVRYGDREMATIGGFDFWGQGTLVTVSS

SEQ ID NO: 518 - protein, 108 aa, Artificial Sequence
  source: /note="Description of Artificial Sequence: Synthetic polypeptide"
SYELTQPPSVSVSPGQTARITCSGDALPKQYAYWYQQSPGQAPVLVIYKDSERPSGIPERFSGSSSGTTVTLTISGVQAEDEADYYCQSADSGGTSRIFGGGTKLTVL

SEQ ID NO: 519 - protein, 124 aa, Artificial Sequence
  source: /note="Description of Artificial Sequence: Synthetic polypeptide"
QVQLQESGPGLVRSTETLSLTCLVSGDSINSHYWSWLRQSPGRGLEWIGYIYYTGPTNYNPSLKSRVSISLGTSKDQFSLKLSSVTAADTARYYCARNKVFWRGSDFYYYMDVWGKGTTVTVSS

SEQ ID NO: 520 - protein, 110 aa, Artificial Sequence
  source: /note="Description of Artificial Sequence: Synthetic polypeptide"
EIVLTQSPGTLSLSLGERATLSCRASQSLANNYLAWYQQKPGQAPRLLMYDASTRATGIPDRFSGSGSGTDFTLTISRLEPEDFAVYYCQQFVTSHHMYIFGQGTKVEIK

SEQ ID NO: 521 - protein, 129 aa, Artificial Sequence
  source: /note="Description of Artificial Sequence: Synthetic polypeptide"
HVQLQESGPGLVKPSETLSLTCTVSGGSISSNNYYWGWIRQTPGKGLEWIGSIYYSGSTNYNPSLKSRVTISVDTSKNQFSLKLSSVTAADTAVYYCARGARWQARPATRIDGVAFDIWGQGTMVTVSS

SEQ ID NO: 522 - protein, 129 aa, Artificial Sequence
  source: /note="Description of Artificial Sequence: Synthetic polypeptide"
QVQLQESGPGLVKPSETLSLTCTVSGGSISSNNYYWGWIRQTPGKGLEWIGSIYYSGSTNYNPSLKSRVTISVDTSKNQFSLKLSSVTAADTAVYYCARGARWQARPATRIDGVAFDIWGQGTMVTVSS

SEQ ID NO: 523 - protein, 121 aa, Artificial Sequence
  source: /note="Description of Artificial Sequence: Synthetic polypeptide"
EVQLVQSGAEVKKPGASVKVSCKASGYTFTSYGISWVRQAPGQGLEWMGWISAYNGNTNYAQKLQGRVTMTTDTSTSTAYMELRSLRSDDTAVYYCARDWSRSGYYLPDYWGQGTLVTVSS

SEQ ID NO: 524 - protein, 107 aa, Artificial Sequence
  source: /note="Description of Artificial Sequence: Synthetic polypeptide"
ETTLTQSPGTLSLSPGERATLSCRASQTVTRNYLAWYQQKPGQAPRLLMYGASNRAAGVPDRFSGSGSGTDFTLTISRLEPEDFAVYYCQQFGSPYTFGQGTKVEIK

SEQ ID NO: 525 - protein, 112 aa, Artificial Sequence
  source: /note="Description of Artificial Sequence: Synthetic polypeptide"
DVVMTQSPLSLPVTLGQPASISCRSSQSLLHSNGYNYLDWYLQRPGQSPHLLIFLGSNRASGVPDRFSGSGSGTDFTLKISRVEAEDVGIYYCMQALQTPPTFGQGTKVEIK

SEQ ID NO: 526 - protein, 120 aa, Artificial Sequence
  source: /note="Description of Artificial Sequence: Synthetic polypeptide"
EVQLVQSGAEVKKPGASVKVSCKASGYKFSSYWIEWVKQAPGQGLEWIGEILPGSDTTNYNEKFKDRATFTSDTSINTAYMELSRLRSDDTAVYYCARDRGNYRAWFGYWGQGTLVTVSS

SEQ ID NO: 527 - protein, 107 aa, Artificial Sequence
  source: /note="Description of Artificial Sequence: Synthetic polypeptide"
DIQMTQSPSSLSASVGDRVTITCRASQDISNYLNWYQQKPGGAVKFLIYYTSRLHSGVPSRFSGSGSGTDYTLTISSLQPEDFATYFCQQGEALPWTFGGGTKVEIK

SEQ ID NO: 528 - protein, 119 aa, Artificial Sequence
  source: /note="Description of Artificial Sequence: Synthetic polypeptide"
EVQLVQSGAEVKKPGSSVKVSCKASGFTFTDYYIHWVKQAPGQGLEWIGLVYPYIGGTNYNQKFKGKATLTVDTSTTTAYMEMSSLRSEDTAVYYCARGDNKYDAMDYWGQGTTVTVSS

SEQ ID NO: 529 - protein, 110 aa, Artificial Sequence
  source: /note="Description of Artificial Sequence: Synthetic polypeptide"
DIVLTQSPDSLAVSLGERATINCRASQSVSTSSYSYMHWYQQKPGQPPKLLIKYASSLESGVPDRFSGSGSGTDFTLTISSLQAEDVAVYYCEQSWEIRTFGGGTKVEIK

SEQ ID NO: 530 - protein, 121 aa, Artificial Sequence
  source: /note="Description of Artificial Sequence: Synthetic polypeptide"
EVQLVQSGAEVKKPGSSVKVSCKASGYTFTNYWMHWVKQAPGQGLEWIGMIHPNSGSTKHNEKFRGKATLTVDESTTTAYMELSSLRSEDTAVYYCARSDFGNYRWYFDVWGQGTTVTVSS

SEQ ID NO: 531 - protein, 107 aa, Artificial Sequence
  source: /note="Description of Artificial Sequence: Synthetic polypeptide"
EIVLTQSPATLSLSPGERATLSCRASQSSSNNLHWYQQKPGQAPRVLIKYVSQSISGIPARFSGSGSGTDFTLTISSLEPEDFAVYFCQQSNSWPFTFGQGTKLEIK

SEQ ID NO: 532 - protein, 119 aa, Artificial Sequence
  source: /note="Description of Artificial Sequence: Synthetic polypeptide"
EVQLVQSGAEVKKPGSSVKVSCKASGFTFTDYYIHWVKQAPGQGLEWIGLVYPYIGGSSYNQQFKGKATLTVDTSTSTAYMELSSLRSEDTAVYYCARGDNNYDAMDYWGQGTTVTVSS

SEQ ID NO: 533 - protein, 110 aa, Artificial Sequence
  source: /note="Description of Artificial Sequence: Synthetic polypeptide"
DIVLTQSPDSLAVSLGERATISCRASQSVSTSTYNYMHWYQQKPGQPPKLLVKYASNLESGVPDRFSGSGSGTDFTLTISSLQAEDVAVYYCHHTWEIRTFGGGTKVEIK

SEQ ID NO: 534 - protein, 120 aa, Artificial Sequence
  source: /note="Description of Artificial Sequence: Synthetic polypeptide"
EVQLVESGGGLVQPGGSLRLSCAVSGFSLTSYGVHWVRQATGKGLEWLGVIWAGGSTNYNSALMSRLTISKENAKSSVYLQMNSLRAGDTAMYYCATHMITEDYYGMDYWGQGTTVTVSS

SEQ ID NO: 535 - protein, 112 aa, Artificial Sequence
  source: /note="Description of Artificial Sequence: Synthetic polypeptide"
DIVMTQSPDSLAVSLGERATINCKSSQSLLNSRTRKNYLAWYQQKPGQSPKLLIYWASTRESGVPDRFSGSGSGTDFTLTISSLQAEDVAVYYCKQSYNLPTFGGGTKVEIK

SEQ ID NO: 536 - protein, 121 aa, Artificial Sequence
  source: /note="Description of Artificial Sequence: Synthetic polypeptide"
EVQLVQSGAEVKKPGASVKVSCKASGVTFTSYWIGWVRQAPGQGLEWIGDIYPGGGYTNYNEKFKGRVTITRDTSTSTAYLELSSLASEDTAVYYCARLAGSSYRGAMDSWGQGTLVTVSS

SEQ ID NO: 537 - protein, 108 aa, Artificial Sequence
  source: /note="Description of Artificial Sequence: Synthetic polypeptide"
DIQMTQSPSSLSASVGDRVTITCKASQGFNKYVAWYQQKPGKAPKLLIYYTSTLQPGVPSRFSGSGSGRDYTLTISSLQPEDFATYYCLQYGDLLYAFGQGTKVEIKR

SEQ ID NO: 538 - protein, 118 aa, Artificial Sequence
  source: /note="Description of Artificial Sequence: Synthetic polypeptide"
EVQLVQSGAEVKKPGESLRISCKGSGYSFTAYWIEWVRQAPGKGLEWIGEILPGSDSTNYNEKFKGHVTISADKSISTAYLQWSSLKASDTAVYYCARSGYYGSSQYWGQGTLVTVSS

SEQ ID NO: 539 - protein, 111 aa, Artificial Sequence
  source: /note="Description of Artificial Sequence: Synthetic polypeptide"
DIVLTQSPASLAVSPGQRATITCRASESVDSYGNSFMHWYQQKPGQPPKLLIYLTSNLESGVPDRFSGSGSGTDFTLTINPVEANDAATYYCQQNAEDPRTFGGGTKLEIK

SEQ ID NO: 540 - protein, 118 aa, Artificial Sequence
  source: /note="Description of Artificial Sequence: Synthetic polypeptide"
QMQLVESGGGLVQPGRSLRLSCAASGFTFDDYAIHWVRQAPGKGLEWVSGISWNSEIVGYGDSVKGRFTISRDNAKNSLDLQMNSLRAEDTAVYYCARGSSGRAFDIWGQGTMVTVSS

SEQ ID NO: 541 - protein, 113 aa, Artificial Sequence
  source: /note="Description of Artificial Sequence: Synthetic polypeptide"
SGVGSDIQMTQSPSSVSASVGDRITITCRASQSISTYLNWYQQKPGKAPKLLIYGATSLQSGVPSKFSGSGSGTDFTLTIRGLQPDDFGTYYCQQSYNLPRTFGQGTKLDIKR

SEQ ID NO: 542 - protein, 117 aa, Artificial Sequence
  source: /note="Description of Artificial Sequence: Synthetic polypeptide"
  MOD_RES (50)..(50): Any amino acid
QVQLVESGGGVVQPGRSLRLSCVGSFTFSNYGMHWVRQAPGKGLQWVAVXSYDGSLKKYYADSVKGRFTISRDNSKNTLYLQMNSLRSEDTAVYYCARGTTMDVWGQGKGTTVTVSS

SEQ ID NO: 543 - protein, 118 aa, Artificial Sequence
  source: /note="Description of Artificial Sequence: Synthetic polypeptide"
SGVGSQSALTQPPSASGTPGQRVTISCSGSNSNIGSNTVNWYQQFPGKAPQLLIFGHNQRPSGVPDRFSGSKSGTSASLSISGLQSEDEAHYYCASWDDTVSGPKWVFGGGTKVDIKR

SEQ ID NO: 544 - protein, 119 aa, Artificial Sequence
  source: /note="Description of Artificial Sequence: Synthetic polypeptide"
EVQLVESGGGVVQPGRSLRLSCSSSGFDFTTYWMSWVRQAPGKGLEWVAEIHPDSSTINYAPSLKDRFTISRDNSKNTLFLQMDSLRPEDTGVYFCASLYFGFPWFAYWGQGTPVTVSS

SEQ ID NO: 545 - protein, 106 aa, Artificial Sequence
  source: /note="Description of Artificial Sequence: Synthetic polypeptide"
DIQLTQSPSSLSASVGDRVTITCKASQDVGTSVAWYQQKPGKAPKLLIYWTSTRHTGVPSRFSGSGSGTDFTFTISSLQPEDIATYYCQQYSLYRSFGQGTKVEIK

SEQ ID NO: 546 - protein, 128 aa, Artificial Sequence; identical to SEQ ID NO: 252
  source: /note="Description of Artificial Sequence: Synthetic polypeptide"

SEQ ID NO: 547 - protein, 107 aa, Artificial Sequence; identical to SEQ ID NO: 257
  source: /note="Description of Artificial Sequence: Synthetic polypeptide"

SEQ ID NO: 548 - protein, 107 aa, Artificial Sequence; identical to SEQ ID NO: 480
  source: /note="Description of Artificial Sequence: Synthetic polypeptide"

SEQ ID NO: 549 - protein, 116 aa, Artificial Sequence; identical to SEQ ID NO: 475
  source: /note="Description of Artificial Sequence: Synthetic polypeptide"

SEQ ID NO: 550 - protein, 118 aa, Artificial Sequence
  source: /note="Description of Artificial Sequence: Synthetic polypeptide"
QIVESGGGLVQPKESLKISCTASGFTFSNAAIYWVRQTPGKGLEWVGRIRTRPSKYATDYADSVRGRFTISRDDSKSMVYLQMDNLRTEDTAMYYCTPRATEDVPFYWGQGVMVTVSS

SEQ ID NO: 551 - protein, 109 aa, Artificial Sequence
  source: /note="Description of Artificial Sequence: Synthetic polypeptide"
DIVMTQTPSSQAVSAGEKVTMNCKSSQSVLYDENKKNYLAWYQQKSGQSPKLLIYWASTGESGVPDRFIGSGSGTDFTLTISSVQAEDLAVYYCQQYYDFPPTFGGGTK

SEQ ID NO: 552 - protein, 9 aa, Artificial Sequence
  source: /note="Description of Artificial Sequence: Synthetic peptide"
QHFWNTPWT

SEQ ID NO: 553 - protein, 9 aa, Artificial Sequence
  source: /note="Description of Artificial Sequence: Synthetic peptide"
QQGHTLPYT

SEQ ID NO: 554 - protein, 7 aa, Artificial Sequence
  source: /note="Description of Artificial Sequence: Synthetic peptide"
SNDGYYS

SEQ ID NO: 555 - protein, 7 aa, Artificial Sequence
  source: /note="Description of Artificial Sequence: Synthetic peptide"
RYYLGVD

SEQ ID NO: 556 - protein, 7 aa, Artificial Sequence
  source: /note="Description of Artificial Sequence: Synthetic peptide"
DDSGRFP

SEQ ID NO: 557 - protein, 7 aa, Artificial Sequence
  source: /note="Description of Artificial Sequence: Synthetic peptide"
YGYAVDY

SEQ ID NO: 558 - protein, 8 aa, Artificial Sequence
  source: /note="Description of Artificial Sequence: Synthetic peptide"
YYGIYVDY

SEQ ID NO: 559 - protein, 4 aa, Artificial Sequence
  source: /note="Description of Artificial Sequence: Synthetic peptide"
FLVY

SEQ ID NO: 560 - protein, 7 aa, Artificial Sequence
  source: /note="Description of Artificial Sequence: Synthetic peptide"
NFGILGY

SEQ ID NO: 561 - protein, 7 aa, Artificial Sequence
  source: /note="Description of Artificial Sequence: Synthetic peptide"
YPNALDY

SEQ ID NO: 562 - protein, 10 aa, Artificial Sequence
  source: /note="Description of Artificial Sequence: Synthetic peptide"
GLKSFYAMDH

SEQ ID NO: 563 - protein, 9 aa, Artificial Sequence
  source: /note="Description of Artificial Sequence: Synthetic peptide"
QQGKTLPWT

SEQ ID NO: 564 - protein, 9 aa, Artificial Sequence
  source: /note="Description of Artificial Sequence: Synthetic peptide"
QQGNTLPPT

SEQ ID NO: 565 - protein, 9 aa, Artificial Sequence
  source: /note="Description of Artificial Sequence: Synthetic peptide"
QQHYITPLT

SEQ ID NO: 566 - protein, 9 aa, Artificial Sequence
  source: /note="Description of Artificial Sequence: Synthetic peptide"
QQYGNLPYT

SEQ ID NO: 567 - protein, 9 aa, Artificial Sequence
  source: /note="Description of Artificial Sequence: Synthetic peptide"
QQYYSTPRT

SEQ ID NO: 568 - protein, 9 aa, Artificial Sequence
  source: /note="Description of Artificial Sequence: Synthetic peptide"
GQSYNYPPT

SEQ ID NO: 569 - protein, 9 aa, Artificial Sequence
  source: /note="Description of Artificial Sequence: Synthetic peptide"
WQDTHFPHV

SEQ ID NO: 570 - skipped

SEQ ID NO: 571 - protein, 8 aa, Unknown
  source: /note="Description of Unknown: Protease cleavage site sequence"
SARGPSRW

SEQ ID NO: 572 - protein, 8 aa, Unknown
  source: /note="Description of Unknown: Protease cleavage site sequence"
TARGPSFK

SEQ ID NO: 573 - protein, 8 aa, Unknown
  source: /note="Description of Unknown: Protease cleavage site sequence"
LSGRSDNH

SEQ ID NO: 574 - protein, 8 aa, Unknown
  source: /note="Description of Unknown: Protease cleavage site sequence"
GGWHTGRN

SEQ ID NO: 575 - protein, 8 aa, Unknown
  source: /note="Description of Unknown: Protease cleavage site sequence"
HTGRSGAL

SEQ ID NO: 576 - protein, 8 aa, Unknown
  source: /note="Description of Unknown: Protease cleavage site sequence"
PLTGRSGG

SEQ ID NO: 577 - protein, 8 aa, Unknown
  source: /note="Description of Unknown: Protease cleavage site sequence"
AARGPAIH

SEQ ID NO: 578 - protein, 8 aa, Unknown
  source: /note="Description of Unknown: Protease cleavage site sequence"
RGPAFNPM

SEQ ID NO: 579 - protein, 8 aa, Unknown
  source: /note="Description of Unknown: Protease cleavage site sequence"
SSRGPAYL

SEQ ID NO: 580 - protein, 8 aa, Unknown
  source: /note="Description of Unknown: Protease cleavage site sequence"
RGPATPIM

SEQ ID NO: 581 - protein, 4 aa, Unknown
  source: /note="Description of Unknown: Protease cleavage site sequence"
RGPA

SEQ ID NO: 582 - protein, 10 aa, Unknown
  source: /note="Description of Unknown: Protease cleavage site sequence"
GGQPSGMWGW

SEQ ID NO: 583 - protein, 10 aa, Unknown
  source: /note="Description of Unknown: Protease cleavage site sequence"
FPRPLGITGL

SEQ ID NO: 584 - protein, 10 aa, Unknown
  source: /note="Description of Unknown: Protease cleavage site sequence"
VHMPLGFLGP

SEQ ID NO: 585 - protein, 8 aa, Unknown
  source: /note="Description of Unknown: Protease cleavage site sequence"
SPLTGRSG

SEQ ID NO: 586 - protein, 8 aa, Unknown
  source: /note="Description of Unknown: Protease cleavage site sequence"
SAGFSLPA

SEQ ID NO: 587 - protein, 9 aa, Unknown
  source: /note="Description of Unknown: Protease cleavage site sequence"
LAPLGLQRR

SEQ ID NO: 588 - protein, 8 aa, Unknown
  source: /note="Description of Unknown: Protease cleavage site sequence"
SGGPLGVR

SEQ ID NO: 589 - protein, 4 aa, Unknown
  source: /note="Description of Unknown: Protease cleavage site sequence"
PLGL

SEQ ID NO: 590 - protein, 8 aa, Unknown
  source: /note="Description of Unknown: Protease cleavage site sequence"
LSGRSGNH

SEQ ID NO: 591 - protein, 9 aa, Unknown
  source: /note="Description of Unknown: Protease cleavage site sequence"
SGRSANPRG

SEQ ID NO: 592 - protein, 8 aa, Unknown
  source: /note="Description of Unknown: Protease cleavage site sequence"
LSGRSDDH

SEQ ID NO: 593 - protein, 8 aa, Unknown
  source: /note="Description of Unknown: Protease cleavage site sequence"
LSGRSDIH

SEQ ID NO: 594 - protein, 8 aa, Unknown
  source: /note="Description of Unknown: Protease cleavage site sequence"
LSGRSDQH

SEQ ID NO: 595 - protein, 8 aa, Unknown
  source: /note="Description of Unknown: Protease cleavage site sequence"
LSGRSDTH

SEQ ID NO: 596 - protein, 8 aa, Unknown
  source: /note="Description of Unknown: Protease cleavage site sequence"
LSGRSDYH

SEQ ID NO: 597 - protein, 8 aa, Unknown
  source: /note="Description of Unknown: Protease cleavage site sequence"
LSGRSDNP

SEQ ID NO: 598 - protein, 8 aa, Unknown
  source: /note="Description of Unknown: Protease cleavage site sequence"
LSGRSANP

SEQ ID NO: 599 - protein, 8 aa, Unknown
  source: /note="Description of Unknown: Protease cleavage site sequence"
LSGRSANI

SEQ ID NO: 600 - protein, 8 aa, Unknown
  source: /note="Description of Unknown: Protease cleavage site sequence"
LSGRSDNI

SEQ ID NO: 601 - protein, 8 aa, Unknown
  source: /note="Description of Unknown: Protease cleavage site sequence"
LSGRSDNH

SEQ ID NO: 602 - protein, 8 aa, Unknown
  source: /note="Description of Unknown: Protease cleavage site sequence"
TGRGPSWV

SEQ ID NO: 603 - protein, 8 aa, Unknown
  source: /note="Description of Unknown: Protease cleavage site sequence"
PLTGRSGG

SEQ ID NO: 604 - protein, 10 aa, Unknown
  source: /note="Description of Unknown: Protease cleavage site sequence"
GGQPSGMWGW

SEQ ID NO: 605 - protein, 10 aa, Unknown
  source: /note="Description of Unknown: Protease cleavage site sequence"
FPRPLGITGL

SEQ ID NO: 606 - protein, 10 aa, Unknown
  source: /note="Description of Unknown: Protease cleavage site sequence"
VHMPLGFLGP

SEQ ID NO: 607 - protein, 4 aa, Unknown
  source: /note="Description of Unknown: Protease cleavage site sequence"
PLGL

SEQ ID NO: 608 - protein, 8 aa, Unknown
  source: /note="Description of Unknown: Protease cleavage site sequence"
SARGPSRW

SEQ ID NO: 609 - protein, 8 aa, Unknown
  source: /note="Description of Unknown: Protease cleavage site sequence"
TARGPSFK

SEQ ID NO: 610 - protein, 8 aa, Unknown
  source: /note="Description of Unknown: Protease cleavage site sequence"
GGWHTGRN

SEQ ID NO: 611 - protein, 8 aa, Unknown
  source: /note="Description of Unknown: Protease cleavage site sequence"
HTGRSGAL

SEQ ID NO: 612 - protein, 8 aa, Unknown
  source: /note="Description of Unknown: Protease cleavage site sequence"
AARGPAIH

SEQ ID NO: 613 - protein, 8 aa, Unknown
  source: /note="Description of Unknown: Protease cleavage site sequence"
RGPAFNPM

SEQ ID NO: 614 - protein, 8 aa, Unknown
  source: /note="Description of Unknown: Protease cleavage site sequence"
SSRGPAYL

SEQ ID NO: 615 - protein, 8 aa, Unknown
  source: /note="Description of Unknown: Protease cleavage site sequence"
RGPATPIM

SEQ ID NO: 616 - protein, 4 aa, Unknown
  source: /note="Description of Unknown: Protease cleavage site sequence"
RGPA

SEQ ID NO: 617 - protein, 8 aa, Unknown
  source: /note="Description of Unknown: Protease cleavage site sequence"
LSGRSGNH

SEQ ID NO: 618 - protein, 9 aa, Unknown
  source: /note="Description of Unknown: Protease cleavage site sequence"
SGRSANPRG

SEQ ID NO: 619 - protein, 8 aa, Unknown
  source: /note="Description of Unknown: Protease cleavage site sequence"
LSGRSDDH

SEQ ID NO: 620 - protein, 8 aa, Unknown
  source: /note="Description of Unknown: Protease cleavage site sequence"
LSGRSDIH

SEQ ID NO: 621 - protein, 8 aa, Unknown
  source: /note="Description of Unknown: Protease cleavage site sequence"
LSGRSDQH

SEQ ID NO: 622 - protein, 8 aa, Unknown
  source: /note="Description of Unknown: Protease cleavage site sequence"
LSGRSDTH

SEQ ID NO: 623 - protein, 8 aa, Unknown
  source: /note="Description of Unknown: Protease cleavage site sequence"
LSGRSDYH

SEQ ID NO: 624 - protein, 8 aa, Unknown
  source: /note="Description of Unknown: Protease cleavage site sequence"
LSGRSDNP

SEQ ID NO: 625 - protein, 8 aa, Unknown
  source: /note="Description of Unknown: Protease cleavage site sequence"
LSGRSANP

SEQ ID NO: 626 - protein, 8 aa, Unknown
  source: /note="Description of Unknown: Protease cleavage site sequence"
LSGRSANI

SEQ ID NO: 627 - protein, 8 aa, Unknown
  source: /note="Description of Unknown: Protease cleavage site sequence"
LSGRSDNI

SEQ ID NO: 628 - protein, 7 aa, Unknown
  source: /note="Description of Unknown: Protease cleavage site sequence"
ISSGLSS

SEQ ID NO: 629 - protein, 8 aa, Unknown
  source: /note="Description of Unknown: Protease cleavage site sequence"
QNQALRMA

SEQ ID NO: 630 - protein, 8 aa, Unknown
  source: /note="Description of Unknown: Protease cleavage site sequence"
AQNLLGMV

SEQ ID NO: 631 - protein, 8 aa, Unknown
  source: /note="Description of Unknown: Protease cleavage site sequence"
STFPFGMF

SEQ ID NO: 632 - protein, 8 aa, Unknown
  source: /note="Description of Unknown: Protease cleavage site sequence"
PVGYTSSL

SEQ ID NO: 633 - protein, 8 aa, Unknown
  source: /note="Description of Unknown: Protease cleavage site sequence"
DWLYWPGI

SEQ ID NO: 634 - protein, 8 aa, Unknown
  source: /note="Description of Unknown: Protease cleavage site sequence"
ISSGLLSS

SEQ ID NO: 635 - protein, 8 aa, Unknown
  source: /note="Description of Unknown: Protease cleavage site sequence"
LKAAPRWA

SEQ ID NO: 636 - protein, 8 aa, Unknown
  source: /note="Description of Unknown: Protease cleavage site sequence"
GPSHLVLT

SEQ ID NO: 637 - protein, 8 aa, Unknown
  source: /note="Description of Unknown: Protease cleavage site sequence"
LPGGLSPW

SEQ ID NO: 638 - protein, 8 aa, Unknown
  source: /note="Description of Unknown: Protease cleavage site sequence"
MGLFSEAG

SEQ ID NO: 639 - protein, 8 aa, Unknown
  source: /note="Description of Unknown: Protease cleavage site sequence"
SPLPLRVP

SEQ ID NO: 640 - protein, 8 aa, Unknown
  source: /note="Description of Unknown: Protease cleavage site sequence"
RMHLRSLG

SEQ ID NO: 641 - protein, 8 aa, Unknown
  source: /note="Description of Unknown: Protease cleavage site sequence"
LAAPLGLL

SEQ ID NO: 642 - protein, 8 aa, Unknown
  source: /note="Description of Unknown: Protease cleavage site sequence"
AVGLLAPP

SEQ ID NO: 643 - protein, 8 aa, Unknown
  source: /note="Description of Unknown: Protease cleavage site sequence"
LLAPSHRA

SEQ ID NO: 644 - protein, 8 aa, Unknown
  source: /note="Description of Unknown: Protease cleavage site sequence"
PAGLWLDP

SEQ ID NO: 645 - protein, 8 aa, Unknown
  source: /note="Description of Unknown: Protease cleavage site sequence"
MIAPVAYR

SEQ ID NO: 646 - protein, 8 aa, Unknown
  source: /note="Description of Unknown: Protease cleavage site sequence"
RPSPMWAY

SEQ ID NO: 647 - protein, 8 aa, Unknown
  source: /note="Description of Unknown: Protease cleavage site sequence"
WATPRPMR

SEQ ID NO: 648 - protein, 8 aa, Unknown
  source: /note="Description of Unknown: Protease cleavage site sequence"
FRLLDWQW

SEQ ID NO: 649 - protein, 5 aa, Unknown
  source: /note="Description of Unknown: Protease cleavage site sequence"
ISSGL

SEQ ID NO: 650 - protein, 7 aa, Unknown
  source: /note="Description of Unknown: Protease cleavage site sequence"
ISSGLLS

SEQ ID NO: 651 - protein, 6 aa, Unknown
  source: /note="Description of Unknown: Protease cleavage site sequence"
ISSGLL

SEQ ID NO: 652 - protein, 7 aa, Unknown
  source: /note="Description of Unknown: Protease cleavage site sequence"
ISSGLSS

SEQ ID NO: 653 - protein, 8 aa, Unknown
  source: /note="Description of Unknown: Protease cleavage site sequence"
QNQALRMA

SEQ ID NO: 654 - protein, 8 aa, Unknown
  source: /note="Description of Unknown: Protease cleavage site sequence"
AQNLLGMV

SEQ ID NO: 655 - protein, 8 aa, Unknown
  source: /note="Description of Unknown: Protease cleavage site sequence"
STFPFGMF

SEQ ID NO: 656 - protein, 8 aa, Unknown
  source: /note="Description of Unknown: Protease cleavage site sequence"
PVGYTSSL

SEQ ID NO: 657 - protein, 8 aa, Unknown
  source: /note="Description of Unknown: Protease cleavage site sequence"
DWLYWPGI

SEQ ID NO: 658 - protein, 8 aa, Unknown
  source: /note="Description of Unknown: Protease cleavage site sequence"
ISSGLLSS

SEQ ID NO: 659 - protein, 8 aa, Unknown
  source: /note="Description of Unknown: Protease cleavage site sequence"
LKAAPRWA

SEQ ID NO: 660 - protein, 8 aa, Unknown
  source: /note="Description of Unknown: Protease cleavage site sequence"
GPSHLVLT

SEQ ID NO: 661 - protein, 8 aa, Unknown
  source: /note="Description of Unknown: Protease cleavage site sequence"
LPGGLSPW

SEQ ID NO: 662 - protein, 8 aa, Unknown
  source: /note="Description of Unknown: Protease cleavage site sequence"
MGLFSEAG

SEQ ID NO: 663 - protein, 8 aa, Unknown
  source: /note="Description of Unknown: Protease cleavage site sequence"
SPLPLRVP

SEQ ID NO: 664 - protein, 8 aa, Unknown
  source: /note="Description of Unknown: Protease cleavage site sequence"
RMHLRSLG

SEQ ID NO: 665 - protein, 8 aa, Unknown
  source: /note="Description of Unknown: Protease cleavage site sequence"
LAAPLGLL

SEQ ID NO: 666 - protein, 8 aa, Unknown
  source: /note="Description of Unknown: Protease cleavage site sequence"
AVGLLAPP

SEQ ID NO: 667 - protein, 8 aa, Unknown
  source: /note="Description of Unknown: Protease cleavage site sequence"
LLAPSHRA

SEQ ID NO: 668 - protein, 8 aa, Unknown
  source: /note="Description of Unknown: Protease cleavage site sequence"
PAGLWLDP

SEQ ID NO: 669 - protein, 8 aa, Unknown
  source: /note="Description of Unknown: Protease cleavage site sequence"
MIAPVAYR

SEQ ID NO: 670 - protein, 8 aa, Unknown
  source: /note="Description of Unknown: Protease cleavage site sequence"
RPSPMWAY

SEQ ID NO: 671 - protein, 8 aa, Unknown
  source: /note="Description of Unknown: Protease cleavage site sequence"
WATPRPMR

SEQ ID NO: 672 - protein, 8 aa, Unknown
  source: /note="Description of Unknown: Protease cleavage site sequence"
FRLLDWQW

SEQ ID NO: 673 - protein, 5 aa, Unknown
  source: /note="Description of Unknown: Protease cleavage site sequence"
ISSGL

SEQ ID NO: 674 - protein, 7 aa, Unknown
  source: /note="Description of Unknown: Protease cleavage site sequence"
ISSGLLS

SEQ ID NO: 675 - protein, 6 aa, Unknown
  source: /note="Description of Unknown: Protease cleavage site sequence"
ISSGLL

SEQ ID NO: 676 - protein, 7 aa, Unknown
  source: /note="Description of Unknown: Protease cleavage site sequence"
GPRSFGL

SEQ ID NO: 677 - protein, 6 aa, Unknown
  source: /note="Description of Unknown: Protease cleavage site sequence"
GPRSFG

SEQ ID NO: 678 - protein, 7 aa, Unknown
  source: /note="Description of Unknown: Protease cleavage site sequence"
GPRSFGL

SEQ ID NO: 679 - protein, 6 aa, Unknown
  source: /note="Description of Unknown: Protease cleavage site sequence"
GPRSFG

SEQ ID NO: 680 - protein, 12 aa, Unknown
  source: /note="Description of Unknown: Protease cleavage site sequence"
NTLSGRSENHSG

SEQ ID NO: 681 - protein, 12 aa, Unknown
  source: /note="Description of Unknown: Protease cleavage site sequence"
NTLSGRSGNHGS

SEQ ID NO: 682 - protein, 12 aa, Unknown
  source: /note="Description of Unknown: Protease cleavage site sequence"
TSTSGRSANPRG

SEQ ID NO: 683 - protein, 8 aa, Unknown
  source: /note="Description of Unknown: Protease cleavage site sequence"
TSGRSANP

SEQ ID NO: 684 - protein, 8 aa, Unknown
  source: /note="Description of Unknown: Protease cleavage site sequence"
VAGRSMRP

SEQ ID NO: 685 - protein, 8 aa, Unknown
  source: /note="Description of Unknown: Protease cleavage site sequence"
VVPEGRRS

SEQ ID NO: 686 - protein, 8 aa, Unknown
  source: /note="Description of Unknown: Protease cleavage site sequence"
ILPRSPAF

SEQ ID NO: 687 - protein, 8 aa, Unknown
  source: /note="Description of Unknown: Protease cleavage site sequence"
MVLGRSLL

SEQ ID NO: 688 - protein, 8 aa, Unknown
  source: /note="Description of Unknown: Protease cleavage site sequence"
QGRAITFI

SEQ ID NO: 689 - protein, 8 aa, Unknown
  source: /note="Description of Unknown: Protease cleavage site sequence"
SPRSIMLA

SEQ ID NO: 690 - protein, 8 aa, Unknown
  source: /note="Description of Unknown: Protease cleavage site sequence"
SMLRSMPL

SEQ ID NO: 691 - protein, 12 aa, Unknown
  source: /note="Description of Unknown: Protease cleavage site sequence"
NTLSGRSENHSG

SEQ ID NO: 692 - protein, 12 aa, Unknown
  source: /note="Description of Unknown: Protease cleavage site sequence"
NTLSGRSGNHGS

SEQ ID NO: 693 - protein, 12 aa, Unknown
  source: /note="Description of Unknown: Protease cleavage site sequence"
TSTSGRSANPRG

SEQ ID NO: 694 - protein, 8 aa, Unknown
  source: /note="Description of Unknown: Protease cleavage site sequence"
TSGRSANP

SEQ ID NO: 695 - protein, 8 aa, Unknown
  source: /note="Description of Unknown: Protease cleavage site sequence"
VAGRSMRP

SEQ ID NO: 696 - protein, 8 aa, Unknown
  source: /note="Description of Unknown: Protease cleavage site sequence"
VVPEGRRS

SEQ ID NO: 697 - protein, 8 aa, Unknown
  source: /note="Description of Unknown: Protease cleavage site sequence"
ILPRSPAF

SEQ ID NO: 698 - protein, 8 aa, Unknown
  source: /note="Description of Unknown: Protease cleavage site sequence"
MVLGRSLL

SEQ ID NO: 699 - protein, 8 aa, Unknown
  source: /note="Description of Unknown: Protease cleavage site sequence"
QGRAITFI

SEQ ID NO: 700 - protein, 8 aa, Unknown
  source: /note="Description of Unknown: Protease cleavage site sequence"
SPRSIMLA

SEQ ID NO: 701 - protein, 8 aa, Unknown
  source: /note="Description of Unknown: Protease cleavage site sequence"
SMLRSMPL

SEQ ID NO: 702 - protein, 8 aa, Unknown
  source: /note="Description of Unknown: Protease cleavage site sequence"
LSGRSDNH

SEQ ID NO: 703 - protein, 8 aa, Unknown
  source: /note="Description of Unknown: Protease cleavage site sequence"
TGRGPSWV

SEQ ID NO: 704 - protein, 8 aa, Unknown
  source: /note="Description of Unknown: Protease cleavage site sequence"
PLTGRSGG

SEQ ID NO: 705 - protein, 8 aa, Unknown
  source: /note="Description of Unknown: Protease cleavage site sequence"
TARGPSFK

SEQ ID NO: 706 - protein, 12 aa, Unknown
  source: /note="Description of Unknown: Protease cleavage site sequence"
NTLSGRSENHSG

SEQ ID NO: 707 - protein, 12 aa, Unknown
  source: /note="Description of Unknown: Protease cleavage site sequence"
NTLSGRSGNHGS

SEQ ID NO: 708 - protein, 12 aa, Unknown
  source: /note="Description of Unknown: Protease cleavage site sequence"
TSTSGRSANPRG

SEQ ID NO: 709 - protein, 8 aa, Unknown
  source: /note="Description of Unknown: Protease cleavage site sequence"
TSGRSANP

SEQ ID NO: 710 - protein, 10 aa, Unknown
  source: /note="Description of Unknown: Protease cleavage site sequence"
VHMPLGFLGP

SEQ ID NO: 711 - protein, 8 aa, Unknown
  source: /note="Description of Unknown: Protease cleavage site sequence"
AVGLLAPP

SEQ ID NO: 712 - protein, 8 aa, Unknown
  source: /note="Description of Unknown: Protease cleavage site sequence"
AQNLLGMV

SEQ ID NO: 713 - protein, 8 aa, Unknown
  source: /note="Description of Unknown: Protease cleavage site sequence"
QNQALRMA

SEQ ID NO: 714 - protein, 8 aa, Unknown
  source: /note="Description of Unknown: Protease cleavage site sequence"
LAAPLGLL

SEQ ID NO: 715 - protein, 8 aa, Unknown
  source: /note="Description of Unknown: Protease cleavage site sequence"
STFPFGMF

SEQ ID NO: 716 - protein, 8 aa, Unknown
  source: /note="Description of Unknown: Protease cleavage site sequence"
ISSGLLSS

SEQ ID NO: 717 - protein, 8 aa, Unknown
  source: /note="Description of Unknown: Protease cleavage site sequence"
PAGLWLDP

SEQ ID NO: 718 - protein, 8 aa, Unknown
  source: /note="Description of Unknown: Protease cleavage site sequence"
VAGRSMRP

SEQ ID NO: 719 - protein, 8 aa, Unknown
  source: /note="Description of Unknown: Protease cleavage site sequence"
VVPEGRRS

SEQ ID NO: 720 - protein, 8 aa, Unknown
  source: /note="Description of Unknown: Protease cleavage site sequence"
ILPRSPAF

SEQ ID NO: 721 - protein, 8 aa, Unknown
  source: /note="Description of Unknown: Protease cleavage site sequence"
MVLGRSLL

SEQ ID NO: 722 - protein, 8 aa, Unknown
  source: /note="Description of Unknown: Protease cleavage site sequence"
QGRAITFI

SEQ ID NO: 723 - protein, 8 aa, Unknown
  source: /note="Description of Unknown: Protease cleavage site sequence"
SPRSIMLA

SEQ ID NO: 724 - protein, 8 aa, Unknown
  source: /note="Description of Unknown: Protease cleavage site sequence"
SMLRSMPL

SEQ ID NO: 725 - protein, 8 aa, Unknown
  source: /note="Description of Unknown: Protease cleavage site sequence"
SARGPSRW

SEQ ID NO: 726 - protein, 7 aa, Unknown
  source: /note="Description of Unknown: Protease cleavage site sequence"
GWHTGRN

SEQ ID NO: 727 - protein, 8 aa, Unknown
  source: /note="Description of Unknown: Protease cleavage site sequence"
HTGRSGAL

SEQ ID NO: 728 - protein, 8 aa, Unknown
  source: /note="Description of Unknown: Protease cleavage site sequence"
AARGPAIH

SEQ ID NO: 729 - protein, 8 aa, Unknown
  source: /note="Description of Unknown: Protease cleavage site sequence"
RGPAFNPM

SEQ ID NO: 730 - protein, 8 aa, Unknown
  source: /note="Description of Unknown: Protease cleavage site sequence"
SSRGPAYL

SEQ ID NO: 731 - protein, 8 aa, Unknown
  source: /note="Description of Unknown: Protease cleavage site sequence"
RGPATPIM

SEQ ID NO: 732 - protein, 4 aa, Unknown
  source: /note="Description of Unknown: Protease cleavage site sequence"
RGPA

SEQ ID NO: 733 - protein, 10 aa, Unknown
  source: /note="Description of Unknown: Protease cleavage site sequence"
GGQPSGMWGW

SEQ ID NO: 734 - protein, 10 aa, Unknown
  source: /note="Description of Unknown: Protease cleavage site sequence"
FPRPLGITGL

SEQ ID NO: 735 - protein, 8 aa, Unknown
  source: /note="Description of Unknown: Protease cleavage site sequence"
SPLTGRSG

SEQ ID NO: 736 - protein, 8 aa, Unknown
  source: /note="Description of Unknown: Protease cleavage site sequence"
SAGFSLPA

SEQ ID NO: 737 - protein, 9 aa, Unknown
  source: /note="Description of Unknown: Protease cleavage site sequence"
LAPLGLQRR

SEQ ID NO: 738 - protein, 8 aa, Unknown
  source: /note="Description of Unknown: Protease cleavage site sequence"
SGGPLGVR

SEQ ID NO: 739 - protein, 4 aa, Unknown
  source: /note="Description of Unknown: Protease cleavage site sequence"
PLGL

SEQ ID NO: 740 - protein, 7 aa, Unknown
  source: /note="Description of Unknown: Protease cleavage site sequence"
ISSGLSS

SEQ ID NO: 741 - protein, 8 aa, Unknown
  source: /note="Description of Unknown: Protease cleavage site sequence"
PVGYTSSL

SEQ ID NO: 742 - protein, 8 aa, Unknown
  source: /note="Description of Unknown: Protease cleavage site sequence"
DWLYWPGI

SEQ ID NO: 743 - protein, 8 aa, Unknown
  source: /note="Description of Unknown: Protease cleavage site sequence"
LKAAPRWA

SEQ ID NO: 744 - protein, 8 aa, Unknown
  source: /note="Description of Unknown: Protease cleavage site sequence"
GPSHLVLT

SEQ ID NO: 745 - protein, 8 aa, Unknown
  source: /note="Description of Unknown: Protease cleavage site sequence"
LPGGLSPW

SEQ ID NO: 746 - protein, 8 aa, Unknown
  source: /note="Description of Unknown: Protease cleavage site sequence"
MGLFSEAG

SEQ ID NO: 747 - protein, 8 aa, Unknown
  source: /note="Description of Unknown: Protease cleavage site sequence"
SPLPLRVP

SEQ ID NO: 748 - protein, 8 aa, Unknown
  source: /note="Description of Unknown: Protease cleavage site sequence"
RMHLRSLG

SEQ ID NO: 749 - protein, 8 aa, Unknown
  source: /note="Description of Unknown: Protease cleavage site sequence"
LLAPSHRA

SEQ ID NO: 750 - protein, 7 aa, Unknown
  source: /note="Description of Unknown: Protease cleavage site sequence"
GPRSFGL

SEQ ID NO: 751 - protein, 6 aa, Unknown
  source: /note="Description of Unknown: Protease cleavage site sequence"
GPRSFG

SEQ ID NO: 752 - protein, 8 aa, Unknown
  source: /note="Description of Unknown: Protease cleavage site sequence"
LSGRSGNH

SEQ ID NO: 753 - protein, 9 aa, Unknown
  source: /note="Description of Unknown: Protease cleavage site sequence"
SGRSANPRG

SEQ ID NO: 754 - protein, 8 aa, Unknown
  source: /note="Description of Unknown: Protease cleavage site sequence"
LSGRSDDH

SEQ ID NO: 755 - protein, 8 aa, Unknown
  source: /note="Description of Unknown: Protease cleavage site sequence"
LSGRSDIH

SEQ ID NO: 756 - protein, 8 aa, Unknown
  source: /note="Description of Unknown: Protease cleavage site sequence"
LSGRSDQH

SEQ ID NO: 757 - protein, 8 aa, Unknown
  source: /note="Description of Unknown: Protease cleavage site sequence"
LSGRSDTH

SEQ ID NO: 758 - protein, 8 aa, Unknown
  source: /note="Description of Unknown: Protease cleavage site sequence"
LSGRSDYH

SEQ ID NO: 759 - protein, 8 aa, Unknown
  source: /note="Description of Unknown: Protease cleavage site sequence"
LSGRSDNP

SEQ ID NO: 760 - protein, 8 aa, Unknown
  source: /note="Description of Unknown: Protease cleavage site sequence"
LSGRSANP

SEQ ID NO: 761 - protein, 8 aa, Unknown
  source: /note="Description of Unknown: Protease cleavage site sequence"
LSGRSANI

SEQ ID NO: 762 - protein, 8 aa, Unknown
  source: /note="Description of Unknown: Protease cleavage site sequence"
LSGRSDNI

SEQ ID NO: 763 - protein, 8 aa, Unknown
  source: /note="Description of Unknown: Protease cleavage site sequence"
MIAPVAYR

SEQ ID NO: 764 - protein, 8 aa, Unknown
  source: /note="Description of Unknown: Protease cleavage site sequence"
RPSPMWAY

SEQ ID NO: 765 - protein, 8 aa, Unknown
  source: /note="Description of Unknown: Protease cleavage site sequence"
WATPRPMR

SEQ ID NO: 766 - protein, 8 aa, Unknown
  source: /note="Description of Unknown: Protease cleavage site sequence"
FRLLDWQW

SEQ ID NO: 767 - protein, 5 aa, Unknown
  source: /note="Description of Unknown: Protease cleavage site sequence"
ISSGL

SEQ ID NO: 768 - protein, 7 aa, Unknown
  source: /note="Description of Unknown: Protease cleavage site sequence"
ISSGLLS

SEQ ID NO: 769 - protein, 6 aa, Unknown
  source: /note="Description of Unknown: Protease cleavage site sequence"
ISSGLL

SEQ ID NO: 770 - protein, 13 aa, Unknown
  source: /note="Description of Unknown: Protease cleavage site sequence"
ISSGLLSGRSDNH

SEQ ID NO: 771 - protein, 18 aa, Unknown
  source: /note="Description of Unknown: Protease cleavage site sequence"
AVGLLAPPGGLSGRSDNH

SEQ ID NO: 772 - protein, 22 aa, Unknown
  source: /note="Description of Unknown: Protease cleavage site sequence"
ISSGLLSSGGSGGSLSGRSDNH

SEQ ID NO: 773 - protein, 22 aa, Unknown
  source: /note="Description of Unknown: Protease cleavage site sequence"
ISSGLLSSGGSGGSLSGRSDNH

SEQ ID NO: 774 - protein, 22 aa, Unknown
  source: /note="Description of Unknown: Protease cleavage site sequence"
AVGLLAPPGGTSTSGRSANPRG

SEQ ID NO: 775 - protein, 22 aa, Unknown
  source: /note="Description of Unknown: Protease cleavage site sequence"
TSTSGRSANPRGGGAVGLLAPP

SEQ ID NO: 776 - protein, 24 aa, Unknown
  source: /note="Description of Unknown: Protease cleavage site sequence"
VHMPLGFLGPGGTSTSGRSANPRG

SEQ ID NO: 777 - protein, 24 aa, Unknown
  source: /note="Description of Unknown: Protease cleavage site sequence"
TSTSGRSANPRGGGVHMPLGFLGP

SEQ ID NO: 778 - protein, 18 aa, Unknown
  source: /note="Description of Unknown: Protease cleavage site sequence"
LSGRSDNHGGAVGLLAPP

SEQ ID NO: 779 - protein, 20 aa, Unknown
  source: /note="Description of Unknown: Protease cleavage site sequence"
VHMPLGFLGPGGLSGRSDNH

SEQ ID NO: 780 - protein, 20 aa, Unknown
  source: /note="Description of Unknown: Protease cleavage site sequence"
LSGRSDNHGGVHMPLGFLGP

SEQ ID NO: 781 - protein, 21 aa, Unknown
  source: /note="Description of Unknown: Protease cleavage site sequence"
SGRSDNHGGSGGSISSGLLSS

SEQ ID NO: 782 - protein, 22 aa, Unknown
  source: /note="Description of Unknown: Protease cleavage site sequence"
LSGRSGNHGGSGGSISSGLLSS

SEQ ID NO: 783 - protein, 22 aa, Unknown
  source: /note="Description of Unknown: Protease cleavage site sequence"
ISSGLLSSGGSGGSLSGRSGNH

SEQ ID NO: 784 - protein, 22 aa, Unknown
  source: /note="Description of Unknown: Protease cleavage site sequence"
LSGRSDNHGGSGGSQNQALRMA

SEQ ID NO: 785 - protein, 22 aa, Unknown
  source: /note="Description of Unknown: Protease cleavage site sequence"
QNQALRMAGGSGGSLSGRSDNH

SEQ ID NO: 786 - protein, 22 aa, Unknown
  source: /note="Description of Unknown: Protease cleavage site sequence"
LSGRSGNHGGSGGSQNQALRMA

SEQ ID NO: 787 - protein, 22 aa, Unknown
  source: /note="Description of Unknown: Protease cleavage site sequence"
QNQALRMAGGSGGSLSGRSGNH

SEQ ID NO: 788 - protein, 13 aa, Unknown
  source: /note="Description of Unknown: Protease cleavage site sequence"
ISSGLLSGRSGNH

SEQ ID NO: 789 - protein, 20 aa, Unknown
  source: /note="Description of Unknown: Protease cleavage site sequence"
ISSGLLSSGGSGGSLSGRNH

SEQ ID NO: 790 - protein, 15 aa, Unknown
  source: /note="Description of Unknown: Protease cleavage site sequence"
ISSGLLSGRSANPRG

SEQ ID NO: 791 - protein, 18 aa, Unknown
  source: /note="Description of Unknown: Protease cleavage site sequence"
AVGLLAPPTSGRSANPRG

SEQ ID NO: 792 - protein, 17 aa, Unknown
  source: /note="Description of Unknown: Protease cleavage site sequence"
AVGLLAPPSGRSANPRG

SEQ ID NO: 793 - protein, 13 aa, Unknown
  source: /note="Description of Unknown: Protease cleavage site sequence"
ISSGLLSGRSDDH

SEQ ID NO: 794 - protein, 13 aa, Unknown
  source: /note="Description of Unknown: Protease cleavage site sequence"
ISSGLLSGRSDIH

SEQ ID NO: 795 - protein, 13 aa, Unknown
  source: /note="Description of Unknown: Protease cleavage site sequence"
ISSGLLSGRSDQH

SEQ ID NO: 796 - protein, 13 aa, Unknown
  source: /note="Description of Unknown: Protease cleavage site sequence"
ISSGLLSGRSDTH

SEQ ID NO: 797 - protein, 13 aa, Unknown
  source: /note="Description of Unknown: Protease cleavage site sequence"
ISSGLLSGRSDYH

SEQ ID NO: 798 - protein, 13 aa, Unknown
  source: /note="Description of Unknown: Protease cleavage site sequence"
ISSGLLSGRSDNP

SEQ ID NO: 799 - protein, 13 aa, Unknown
  source: /note="Description of Unknown: Protease cleavage site sequence"
ISSGLLSGRSANP

SEQ ID NO: 800 - protein, 13 aa, Unknown
  source: /note="Description of Unknown: Protease cleavage site sequence"
ISSGLLSGRSANI

SEQ ID NO: 801 - protein, 18 aa, Unknown
  source: /note="Description of Unknown: Protease cleavage site sequence"
AVGLLAPPGGLSGRSDDH

SEQ ID NO: 802 - protein, 18 aa, Unknown
  source: /note="Description of Unknown: Protease cleavage site sequence"
AVGLLAPPGGLSGRSDIH

SEQ ID NO: 803 - protein, 18 aa, Unknown
  source: /note="Description of Unknown: Protease cleavage site sequence"
AVGLLAPPGGLSGRSDQH

SEQ ID NO: 804 - protein, 18 aa, Unknown
  source: /note="Description of Unknown: Protease cleavage site sequence"
AVGLLAPPGGLSGRSDTH

SEQ ID NO: 805 - protein, 18 aa, Unknown
  source: /note="Description of Unknown: Protease cleavage site sequence"
AVGLLAPPGGLSGRSDYH

SEQ ID NO: 806 - protein, 18 aa, Unknown
  source: /note="Description of Unknown: Protease cleavage site sequence"
AVGLLAPPGGLSGRSDNP

SEQ ID NO: 807 - protein, 18 aa, Unknown
  source: /note="Description of Unknown: Protease cleavage site sequence"
AVGLLAPPGGLSGRSANP

SEQ ID NO: 808 - protein, 18 aa, Unknown
  source: /note="Description of Unknown: Protease cleavage site sequence"
AVGLLAPPGGLSGRSANI

SEQ ID NO: 809 - protein, 13 aa, Unknown
  source: /note="Description of Unknown: Protease cleavage site sequence"
ISSGLLSGRSDNI

SEQ ID NO: 810 - protein, 18 aa, Unknown
  source: /note="Description of Unknown: Protease cleavage site sequence"
AVGLLAPPGGLSGRSDNI

SEQ ID NO: 811 - protein, 5 aa, Unknown
  source: /note="Description of Unknown: Recognition motif sequence"
  MOD_RES (3)..(3): Any amino acid
LPXTG

SEQ ID NO: 812 - protein, 25 aa, Artificial Sequence
  source: /note="Description of Artificial Sequence: Synthetic peptide"
  SITE (1)..(25): This sequence may encompass 2-5 "Gly Gly Gly Gly Ser" repeating units
GGGGSGGGGSGGGGSGGGGSGGGGS

SEQ ID NO: 813 - protein, 25 aa, Artificial Sequence
  source: /note="Description of Artificial Sequence: Synthetic peptide"
  SITE (1)..(25): This sequence may encompass 3-5 "Gly Gly Gly Gly Ser" repeating units
GGGGSGGGGSGGGGSGGGGSGGGGS

SEQ ID NO: 814 - protein, 8 aa, Unknown
  source: /note="Description of Unknown: Pro-urokinase cleavage site sequence"
PRFKIIGG

SEQ ID NO: 815 - protein, 8 aa, Unknown
  source: /note="Description of Unknown: Pro-urokinase cleavage site sequence"
PRFRIIGG

SEQ ID NO: 816 - protein, 9 aa, Unknown
  source: /note="Description of Unknown: TGFbeta cleavage site sequence"
SSRHRRALD

SEQ ID NO: 817 - protein, 14 aa, Unknown
  source: /note="Description of Unknown: Plasminogen cleavage site sequence"
RKSSIIIRMRDVVL

SEQ ID NO: 818 - protein, 7 aa, Unknown
  source: /note="Description of Unknown: Gelatinase cleavage site sequence"
APLGLWA

SEQ ID NO: 819 - protein, 8 aa, Bos taurus
GPQGIAGQ

SEQ ID NO: 820 - protein, 8 aa, Bos taurus
GPQGLLGA

SEQ ID NO: 821 - protein, 5 aa, Bos taurus
GIAGQ

SEQ ID NO: 822 - protein, 8 aa, Homo sapiens
GPLGIAGI

SEQ ID NO: 823 - protein, 8 aa, Homo sapiens
GPEGLRVG

SEQ ID NO: 824 - protein, 8 aa, Homo sapiens
YGAGLGVV

SEQ ID NO: 825 - protein, 8 aa, Homo sapiens
AGLGVVER

SEQ ID NO: 826 - protein, 8 aa, Homo sapiens
AGLGISST

SEQ ID NO: 827 - protein, 8 aa, Homo sapiens
DVAQFVLT

SEQ ID NO: 828 - protein, 8 aa, Homo sapiens
VAQFVLTE

SEQ ID NO: 829 - protein, 8 aa, Homo sapiens
AQFVLTEG

SEQ ID NO: 830 - protein, 8 aa, Homo sapiens
PVQPIGPQ

SEQ ID NO: 831 - protein, 4 aa, Artificial Sequence
  source: /note="Description of Artificial Sequence: Synthetic peptide"
GFLG

SEQ ID NO: 832 - protein, 4 aa, Artificial Sequence
  source: /note="Description of Artificial Sequence: Synthetic peptide"
ALAL

SEQ ID NO: 833 - protein, 6 aa, Artificial Sequence
  source: /note="Description of Artificial Sequence: Synthetic peptide"
SSGPVA

SEQ ID NO: 834 - protein, 10 aa, Artificial Sequence
  source: /note="Description of Artificial Sequence: Synthetic peptide"
  MOD_RES (7)..(7): Homophenylalanine
FFLAQAFRSK

SEQ ID NO: 835 - protein, 8 aa, Artificial Sequence
  source: /note="Description of Artificial Sequence: Synthetic peptide"
IQSRGLFG

SEQ ID NO: 836 - DNA, 10 bp, Artificial Sequence
  source: /note="Description of Artificial Sequence: Synthetic oligonucleotide"
gggggggggg

1. An immune-modulatory conjugate, comprising:
(a) an antibody construct comprising an antigen binding domain and an Fc domain, wherein the antigen binding domain specifically binds to a first antigen expressed on target cells associated with a disease;
(b) at least one immune-modulatory agent, wherein the immune-modulatory agent is:
(1) a TLR8 agonist compound represented by the structure of Formula (IIIA): [chemical structure]
or a pharmaceutically acceptable salt thereof, wherein: [symbol]
represents an optional double bond;
L¹¹ is —C(O)N(R¹⁰)—*, wherein * represents where L¹¹ is bound to R⁶;
L² is —C(O)—;
R¹ and R² are each hydrogen;
R⁴ is selected from: —OR¹⁰, —N(R¹⁰)₂, —C(O)N(R¹⁰)₂, —C(O)R¹⁰, —C(O)OR¹⁰, —S(O)R¹⁰, and —S(O)₂R¹⁰;
R⁶ is selected from phenyl and 5- or 6-membered heteroaryl, any one of which is substituted with one or more substituents selected from R⁷;
R⁷ is selected from —C(O)NHNH₂, —C(O)NH—C₁₋₃alkylene-NH(R¹⁰), —C(O)CH₃, —C₁₋₃alkylene-NHC(O)OR¹⁰, —C₁₋₃alkylene-NHC(O)R¹⁰, —C₁₋₃alkylene-NHC(O)NHR¹⁰, and —C₁₋₃alkylene-NHC(O)—C₁₋₃alkylene-(R¹⁰)₂;
R¹⁰ is independently selected at each occurrence from hydrogen, —NH₂, —C(O)OCH₂C₆H₅; and C₁₋₁₀ alkyl, C₂₋₁₀ alkenyl, C₂₋₁₀ alkynyl, C₃₋₁₂ carbocycle, and 3- to 12-membered heterocycle, each of which is independently optionally substituted at each occurrence with one or more substituents selected from halogen, —CN, —NO₂, —NH₂, ═O, ═S, —C(O)OCH₂C₆H₅, —NHC(O)OCH₂C₆H₅, C₁₋₁₀ alkyl, C₂₋₁₀ alkenyl, C₂₋₁₀ alkynyl, C₃₋₁₂ carbocycle, 3- to 12-membered heterocycle, and haloalkyl;
R¹¹ is selected from C₃₋₁₂ carbocycle and 3- to 12-membered heterocycle, each of which is independently optionally substituted with one or more substituents selected from R¹²; and
wherein any substitutable carbon on the benzazepine core is optionally substituted by a substituent independently selected from R¹², wherein R¹² is independently selected at each occurrence from halogen, —OR¹⁰, —SR¹⁰, —N(R¹⁰)₂, —C(O)R¹⁰, —C(O)N(R¹⁰)₂, —N(R¹⁰)C(O)R¹⁰, —C(O)OR¹⁰, —OC(O)R¹⁰, —S(O)R¹⁰, —S(O)₂R, —NO₂, ═O, ═S, ═N(R¹⁰), and —CN; and C₁₋₁₀ alkyl optionally substituted with one or more substituents independently selected from halogen, —OR¹⁰, —SR¹⁰, —N(R¹⁰)₂, —C(O)R¹⁰, —C(O)N(R¹⁰)₂, —N(R¹⁰)C(O)R¹⁰, —C(O)OR¹⁰, —OC(O)R¹⁰, —S(O)R¹⁰, —S(O)₂R¹⁰, —NO₂, ═O, ═S, ═N(R¹⁰), —CN, C₃₋₁₀ carbocycle and 3- to 10-membered heterocycle; or
(2) a TLR7 agonist selected from the group consisting of an imidazoquinoline, an imidazoquinoline amine, a thiazoquinoline, an aminoquinoline, an aminoquinazoline, a pyrido[3,2-d]pyrimidine-2,4-diamine, pyrimidine-2,4-diamine, 2-aminoimidazole, 1-alkyl-1H-benzimidazol-2-amine, tetrahydropyridopyrimidine, heteroarothiadiazide-2,2-dioxide, and a benzonaphthyridine; or
(3) an inhibitor of a GCPR, an ion channel, a membrane transporter, a phosphatase, an ER protein, TGFβ, a TGFβ signaling pathway, or β-Catenin pathway; and
(c) at least one linker, wherein each linker is covalently attached to the antibody construct and to at least one immune-modulatory agent,
wherein in the conjugate:
(i) the linker is a cleavable linker having a protease cleavage site cleavable by a protease that is preferentially localized in the extracellular microenvironment of the target cells, whereby cleavage of the protease cleavage site releases an active form of the immune-modulatory agent in the extracellular microenvironment; or
(ii) the Fc domain comprises an amino acid sequence having a Kd for a first Fc receptor that is at least 10 fold higher than a Kd of the amino acid sequence for a wild-type IgG1 Fc domain for the first Fc receptor and having a Kd for a second Fc receptor that is the same or lower than a Kd of the amino acid sequence for a wild-type IgG1 Fc domain for the second Fc receptor, thereby allowing the Fc domain to preferentially bind to cells expressing the second Fc receptor; or
(iii) the linker is as set forth in (i) and the Fc domain is as set forth in (ii).

2. The immune-modulatory conjugate of claim 1, wherein the conjugate is represented by the following formula: [chemical structure]
wherein:
A is the antibody construct having the antigen binding domain and the Fc domain;
L is the linker;
Dₓ is the immune-modulatory agent;
n is selected from 1 to 20; and
z is selected from 1 to 20.

3. The immune-modulatory conjugate of claim 2, wherein n is from 1 to 5 and z is from 1 to 8, n is 1 and z is from 1 to 8, or n is 1 and z is from 1 to 5.

4. The immune-modulatory conjugate of claim 1, wherein the conjugate is as set forth in (iii).

5. The immune-modulatory conjugate of claim 2, wherein the linker, L, has the following formula:
Rx-Aₙ-protease cleavage site-Y_{y}—,
wherein Rx is a reactive moiety attached to the antibody construct;
A is a stretcher group and n is 0 or 1; and
Y is a self immolative group and y is 0, 1, or 2.

6. The immune-modulatory conjugate of claim 5, wherein Rx is a succinimide group or a hydrolyzed succinmide group.

7. (canceled)

8. The immune-modulatory conjugate of claim 5, wherein the self-immolative group is a PABA or PABC group.

9. The immune-modulatory conjugate of claim 5, wherein the linker is -maleimidocaproyl-protease cleave site-PABC-.

10.-13. (canceled)

14. The immune-modulatory conjugate of claim 1, wherein the protease is preferentially localized in the extracellular microenvironment of the target cells associated with a disease as compared to the extracellular microenvironment of normal cells by a factor of at least 5:1, 10:1, 25:1, 50:1 or 100:1.

15. (canceled)

16. The immune-modulatory conjugate of claim 1, wherein the linker is not a cleavable linker as set forth in (i) of claim 1.

17.-19. (canceled)

20. The immune-modulatory conjugate of claim 1, wherein the first Fc receptor is an FcγRI, FcγRIIA and FcγRIIIA and the second Fc receptor is an FcRn receptor.

21. The immune-modulatory conjugate of claim 20, wherein the Kd of the Fc domain for the FcRn is at least 5-fold lower than the binding of a wild-type IgG1 to FcRn.

22.-25. (canceled)

26. The immune-modulatory conjugate of claim 1, wherein the first antigen is selected from the group consisting of GD2, GD3, GM2, Le^{y}, sLe, polysialic acid, fucosyl GM1, Tn, STn, BM3, GloboH, CD5, CD19, CD20, CD25, CD37, CD30, CD33, CD45, CAMPATH-1, BCMA, CS-1, PD-L1, B7-H3, B7-DC (PD-L2), HLA-DR, carcinoembryonic antigen (CEA), TAG-72, MUC1, MUC15, MUC16, folate-binding protein, A33, G250, prostate-specific membrane antigen (PSMA), STN1, TNC, CA-125, CA19-9, epidermal growth factor, HER2, IL-2 receptor, EGFRvIII (de2-7 EGFR), EGFR, fibroblast activation protein (FAP), tenascin, a metalloproteinase, endosialin, vascular endothelial growth factor, αvβ3, WT1, LMP2, HPV E6, HPV E7, p53 nonmutant, NY-ESO-1, GLP-3, MelanA/MART1, Ras mutant, gp100, p53 mutant, PR1, bcr-abl, tyrosinase, survivin, PSA, hTERT, a Sarcoma translocation breakpoint fusion protein, EphA2, PAP, ML-IAP, AFP, ERG, NA17, PAX3, ALK, androgen receptor, cyclin B1, MYCN, RhoC, TRP-2, mesothelin (MSLN), PSCA, MAGE A1, MAGE-A3, CYP1B1, PLAV1, BORIS, Tn, ETV6-AML, NY-BR-1, RGS5, SART3, Carbonic anhydrase IX, PAX5, OY-TES1, Sperm protein 17, LCK, MAGE C2, MAGE A4, GAGE, TRAIL1, HMWMAA, AKAP-4, SSX2, XAGE 1, B7H3, Legumain, Tie 3, PAGE4, VEGFR2, MAD-CT-1, PDGFR-B, MAD-CT-2, ROR2, CMET, HER3, EPCAM, CA6, NAPI2B, TROP2, Claudin-6 (CLDN6), Claudin-16 (CLDN16), CLDN18.2, RON, LY6E, FRA, DLL3, PTK7, Uroplakin-1B (UPK1B), LIV1, ROR1, STRA6, TMPRSS3, TMPRSS4, TMEM238, Clorf186, Fos-related antigen 1, VEGFR1, endoglin, VTCN1 (B7-H4), and VISTA.

27.-28. (canceled)

29. The immune-modulatory conjugate of claim 1, wherein the first antigen is selected from the group consisting of Cadherin 11, PDPN, LRRC15, Integrin α4β7, Integrin α2β1, MADCAM, Nephrin, Podocin, IFNAR1, BDCA2, CD30, c-KIT, FAP, CD73, CD38, PDGFRβ, Integrin αvβ1, Integrin αvβ3, Integrin αvβ8, GARP, Endosialin, CTGF, Integrin αvβ6, CD40, PD-1, TIM-3, TNFR2, DEC205, DCIR, CD86, CD45RB, CD45RO, MHC Class II, CD25, LRRC15, MMP14, GPX8, and F2RL2.

30.-58. (canceled)

59. The immune-modulatory conjugate of claim 1, wherein the antigen binding domain comprises a variable region comprising V_{H} and V_{L} sequences at least 90% sequence identity to a pair of V_{H} and V_{L} sequences set forth in TABLE 2 or TABLE 6.

60. (canceled)

61. A pharmaceutical composition comprising the immune-modulatory conjugate of claim 1 and a pharmaceutically acceptable carrier.

62. A method of treating a subject having cancer or a fibrotic or inflammatory disease of the liver, kidney or lung, or systemic scleroderma, or idiopathic pulmonary fibrosis (IPF), or NASH, or cardiomyopathy, comprising administering a therapeutic dose of the pharmaceutical composition of claim 61.

63. (canceled)

64. The method of claim 62, wherein the conjugate is administered intravenously or subcutaneously.

65.-68. (canceled)
